(19) United States
(12) Patent Application Publication
(10) Pub. No.: US 2002/0119919 A1
(43) Pub. Date: Aug. 29, 2002

(54) Nucleic acids, proteins, and antibodies

(76) Inventors: Craig A. Rosen, Laytonsville, MD (US); Steven M. Ruben, Olney, MD (US); Steven C. Barash, Rockville, MD (US)

Correspondence Address: HUMAN GENOME SCIENCES INC, 9410 KEY WEST AVENUE, ROCKVILLE, MD, 20850

(21) Appl. No.: 09/764,855

(22) Filed: Jan. 17, 2001

Related U.S. Application Data
(60) Provisional application No. 60/179,065, filed on Jan. 31, 2000.

(51) Int. Cl. A61K 38/17; C07H 21/04; C12N 9/00; C12P 21/02; C12N 5/06

(52) U.S. Cl. 514/12; 536/23.1; 435/325; 435/320.1; 435/69.1; 435/183

(57) ABSTRACT

The present invention relates to novel colorectal cancer related polynucleotides and the polypeptides encoded by these polynucleotides herein collectively known as “colorectal cancer antigens,” and the use of such colorectal cancer antigens for detecting disorders of the colon and/or rectum, particularly the presence of colorectal cancer and colorectal cancer metastases. More specifically, isolated colorectal cancer associated nucleic acid molecules are provided encoding novel colorectal cancer associated polypeptides. Novel colorectal cancer polypeptides and antibodies that bind to these polypeptides are provided. Also provided are vectors, host cells, and recombinant and synthetic methods for producing human colorectal cancer associated polynucleotides and/or polypeptides. The invention further relates to diagnostic and therapeutic methods useful for diagnosing, treating, preventing and/or prognosing disorders related to the colon and/or rectum, including colorectal cancer, and therapeutic methods for treating such disorders. The invention further relates to screening methods for identifying agonists and antagonists of polynucleotides and polypeptides of the invention. The present invention further relates to methods and/or compositions for inhibiting the production and function of the polypeptides of the present invention.

### STATEMENT UNDER 37 C.F.R. § 1.77(b)(4)

[0001] This application refers to a “Sequence Listing” listed below, which is provided as an electronic document on two identical compact discs (CD-R), labeled “Copy 1” and “Copy 2.” These compact discs each contain the following files, which are hereby incorporated in their entirety herein:

| | | Size in | Date of |
|---|---|---|---|
| Document | File Name | bytes | Creation |
| Sequence Listing | PA110_seqList.txt | 791,599 | 01/15/2001 |
| V Viewer Setup File | SetupDLL.exe | 695,808 | 12/19/2000 |
| V Viewer Help File | v.cnt | 7,984 | 01/05/2001 |
| Controller | | | |
| V Viewer Program File | v.exe | 753,664 | 12/19/2000 |
| V Viewer Help File | v.hlp | 447,766 | 01/05/2001 |

[0002] The Sequence Listing may be viewed on an IBM-PC machine running the MS-Windows operating system by using the V viewer software, licensed by HGS, Inc., included on the compact discs (see World Wide Web URL: http://www.fileviewer.com).

### FIELD OF THE INVENTION

[0003] The present invention relates to novel colorectal cancer related polynucleotides, the polypeptides encoded by these polynucleotides herein collectively referred to as “colorectal cancer antigens,” and antibodies that immunospecifically bind these polypeptides, and the use of such colorectal cancer polynucleotides, antigens, and antibodies for detecting, treating, preventing and/or prognosing disorders of the colon and/or rectum, including, but not limited to, the presence of colorectal cancer and colorectal cancer metastases. More specifically, isolated colorectal cancer nucleic acid molecules are provided encoding novel colorectal cancer polypeptides. Novel colorectal cancer polypeptides and antibodies that bind to these polypeptides are provided. Also provided are vectors, host cells, and recombinant and synthetic methods for producing human colorectal cancer polynucleotides, polypeptides, and/or antibodies. The invention further relates to diagnostic and therapeutic methods useful for diagnosing, treating, preventing and/or prognosing disorders related to the colon and/or rectum, including colorectal cancer, and therapeutic methods for treating such disorders. The invention further relates to screening methods for identifying agonists and antagonists of polynucleotides and polypeptides of the invention. The invention further relates to methods and/or compositions for inhibiting or promoting the production and/or function of the polypeptides of the invention.

### BACKGROUND OF THE INVENTION

[0004] Colorectal cancers are among the most common cancers in men and women in the U.S. and are one of the leading causes of death. Other than surgical resection no other systemic or adjuvant therapy is available. Vogelstein and colleagues have described the sequence of genetic events that appear to be associated with the multistep process of colon cancer development in humans (Trends Genet 9(4):138-41 (1993)). An understanding of the molecular genetics of carcinogenesis, however, has not led to preventative or therapeutic measures. It can be expected that advances in molecular genetics will lead to better risk assessment and early diagnosis but colorectal cancers will remain a deadly disease for a majority of patients due to the lack of an adjuvant therapy. Adjuvant or systemic treatments are likely to arise from a better understanding of the autocrine factors responsible for the continued proliferation of cancer cells.

[0005] Colorectal carcinoma is a malignant neoplastic disease. There is a high incidence of colorectal carcinoma in the Western world, particularly in the United States. Tumors of this type often metastasize through lymphatic and vascular channels. Many patients with colorectal carcinoma eventually die from this disease. In fact, it is estimated that 62,000 persons in the United States alone die of colorectal carcinoma annually.

[0006] At the present time the only systemic treatment available for colon cancer is chemotherapy. However, chemotherapy has not proven to be very effective for the treatment of colon cancers for several reasons, the most important of which is the fact that colon cancers express high levels of the MDR gene (that codes for multi-drug resistance gene products). The MDR gene products actively transport the toxic substances out of the cell before the chemotherapeutic agents can damage the DNA machinery of the cell. These toxic substances harm the normal cell populations more than they harm the colon cancer cells for the above reasons.

[0007] There is no effective systemic treatment for treating colon cancers other than surgically removing the cancers. In the case of several other cancers, including breast cancers, the knowledge of growth promoting factors (such as EGF, estradiol, IGF-11) that appear to be expressed or effect the growth of the cancer cells, has been translated for treatment purposes. But in the case of colon cancers this knowledge has not been applied and therefore the treatment outcome for colon cancers remains bleak.

[0008] There is a need, therefore, for identification and characterization of such factors that modulate activation and differentiation of colon cells, both normally and in disease states. In particular, there is a need to isolate and characterize additional molecules that mediate apoptosis, DNA repair, tumor-mediated angiogenesis, genetic imprinting, immune responses to tumors and tumor antigens and, among other things, that can play a role in detecting, preventing, ameliorating or correcting dysfunctions or diseases of the colon.

[0009] The discovery of new human colorectal cancer associated polynucleotides, the polypeptides encoded by them, and antibodies that immunospecifically bind these polypeptides, satisfies a need in the art by providing new compositions which are useful in the diagnosis, treatment, prevention and/or prognosis of disorders of the colon and/or rectum including, but not limited to, neoplastic disorders, such as, polyps (e.g., sessile polyp, adenomatous polyp, inflammatory polyps) adenomas (e.g., tubular adenoma, tubovillous adenomas, villous adenoma, Gardner syndrome, Peutz-Jeghers syndrome) hyperplastic, polyposis, villous, pseudopolyps, leiomyomas, carcinoids, lipomas, and angiomas cancers (e.g., rectal cancer, adenocarcinoma, colorectal carcinoma, colon cancer, colon carcinoma, colorectal cancer); colonic diseases and/or as described under “Gastrointestinal Disorders” below.

### SUMMARY OF THE INVENTION

[0010] The present invention relates to novel colorectal cancer related polynucleotides, the polypeptides encoded by these polynucleotides herein collectively referred to as “colorectal cancer antigens,” and antibodies that immunospecifically bind these polypeptides, and the use of such colorectal cancer polynucleotides, antigens, and antibodies for detecting, treating, preventing and/or prognosing disorders of the colon and/or rectum, including, but not limited to, the presence of colorectal cancer and colorectal cancer metastases. More specifically, isolated colorectal cancer nucleic acid molecules are provided encoding novel colorectal cancer polypeptides. Novel colorectal cancer polypeptides and antibodies that bind to these polypeptides are provided. Also provided are vectors, host cells, and recombinant and synthetic methods for producing human colorectal cancer polynucleotides, polypeptides, and/or antibodies. The invention further relates to diagnostic and therapeutic methods useful for diagnosing, treating, preventing and/or prognosing disorders related to the colon and/or rectum, including colorectal cancer, and therapeutic methods for treating such disorders. The invention further relates to screening methods for identifying agonists and antagonists of polynucleotides and polypeptides of the invention. The invention further relates to methods and/or compositions for inhibiting or promoting the production and/or function of the polypeptides of the invention.

### DETAILED DESCRIPTION

[0011] Tables

[0012] Table 1A summarizes some of the polynucleotides encompassed by the invention (including cDNA clones related to the sequences (Clone ID NO:Z), contig sequences (contig identifier (Contig ID:) and contig nucleotide sequence identifier (SEQ ID NO:X)) and further summarizes certain characteristics of these polynucleotides and the polypeptides encoded thereby. The first column provides a unique clone identifier, “Clone ID NO:Z”, for a cDNA plasmid related to each colorectal cancer associated contig sequence disclosed in Table 1A. The second column provides a unique contig identifier, “Contig ID:” for each of the contig sequences disclosed in Table 1A. The third column provides the sequence identifier, “SEQ ID NO:X”, for each of the contig polynucleotide sequences disclosed in Table 1A. The fourth column, “ORF (From-To)”, provides the location (i.e., nucleotide position numbers) within the polynucleotide sequence of SEQ ID NO:X that delineate the preferred open reading frame (ORF) shown in the sequence listing and referenced in Table 1A as SEQ ID NO:Y (column 5). Column 6 lists residues comprising predicted epitopes contained in the polypeptides encoded by each of the preferred ORFs (SEQ ID NO:Y). Identification of potential immunogenic regions was performed according to the method of Jameson and Wolf (CABIOS, 4:181-186 (1988)); specifically, the Genetics Computer Group (GCG) implementation of this algorithm, embodied in the program PEPTIDESTRUCTURE (Wisconsin Package v10.0, Genetics Computer Group (GCG), Madison, Wis.). This method returns a measure of the probability that a given residue is found on the surface of the protein. Regions where the antigenic index score is greater than 0.9 over at least 6 amino acids are indicated in Table 1A as “Predicted Epitopes.” In particular embodiments, colorectal cancer associated polypeptides of the invention comprise, or alternatively consist of, one, two, three, four, five or more of the predicted epitopes described in Table 1A. It will be appreciated that depending on the analytical criteria used to predict antigenic determinants, the exact address of the determinant may vary slightly. Column 7, “Tissue Distribution” shows the expression profile of tissue, cells, and/or cell line libraries which express the polynucleotides of the invention. The first number in column 7 (preceding the colon), represents the tissue/cell source identifier code corresponding to the code and description provided in Table 4. Expression of these polynucleotides was not observed in the other tissues and/or cell libraries tested. For those identifier codes in which the first two letters are not “AR”, the second number in column 7 (following the colon), represents the number of times a sequence corresponding to the reference polynucleotide sequence (e.g., SEQ ID NO:X) was identified in the tissue/cell source. Those tissue/cell source identifier codes in which the first two letters are “AR” designate information generated using DNA array technology. Utilizing this technology, cDNAs were amplified by PCR and then transferred, in duplicate, onto the array. Gene expression was assayed through hybridization of first strand cDNA probes to the DNA array. cDNA probes were generated from total RNA extracted from a variety of different tissues and cell lines. Probe synthesis was performed in the presence of ³³p dCTP, using oligo(dT) to prime reverse transcription. After hybridization, high stringency washing conditions were employed to remove non-specific hybrids from the array. The remaining signal, emanating from each gene target, was measured using a Phosphorimager. Gene expression was reported as Phosphor Stimulating Luminescence (PSL) which reflects the level of phosphor signal generated from the probe hybridized to each of the gene targets represented on the array. A local background signal subtraction was performed before the total signal generated from each array was used to normalize gene expression between the different hybridizations. The value presented after “[array code]:” represents the mean of the duplicate values, following background subtraction and probe normalization. One of skill in the art could routinely use this information to identify normal and/or diseased tissue(s) which show a predominant expression pattern of the corresponding polynucleotide of the invention or to identify polynucleotides which show predominant and/or specific tissue and/or cell expression. Column 8, “Cytologic Band,” provides the chromosomal location of polynucleotides corresponding to SEQ ID NO:X. Chromosomal location was determined by finding exact matches to EST and cDNA sequences contained in the NCBI (National Center for Biotechnology Information) UniGene database. Given a presumptive chromosomal location, disease locus association was determined by comparison with the Morbid Map, derived from Online Mendelian Inheritance in Man (Online Mendelian Inheritance in Man, OMIM™. McKusick-Nathans Institute for Genetic Medicine, Johns Hopkins University (Baltimore, Md.) and National Center for Biotechnology Information, National Library of Medicine (Bethesda, Md.) 2000. World Wide Web URL: http://www.ncbi.nlm.nih.gov/omim/). If the putative chromosomal location of the Query overlapped with the chromosomal location of a Morbid Map entry, an OMIM identification number is provided in column 9 labeled “OMIM Disease Reference(s)”. A key to the OMIM reference identification numbers is provided in Table 5.

[0013] Table 1B summarizes additional polynucleotides encompassed by the invention (including cDNA clones related to the sequences (Clone ID NO:Z), contig sequences (contig identifier (Contig ID:) contig nucleotide sequence identifiers (SEQ ID NO:X)), and genomic sequences (SEQ ID NO:B). The first column provides a unique clone identifier, “Clone ID NO:Z”, for a cDNA clone related to each contig, sequence. The second column provides the sequence identifier, “SEQ ID NO:X”, for each contig sequence. The third column provides a unique contig identifier, “Contig ID:” for each contig sequence. The fourth column, provides a BAC identifier “BAC ID NO:A” for the BAC clone referenced in the corresponding row of the table. The fifth column provides the nucleotide sequence identifier, “SEQ ID NO:B” for a fragment of the BAC clone identified in column four of the corresponding row of the table. The sixth column, “Exon From-To”, provides the location (i.e., nucleotide position numbers) within the polynucleotide sequence of SEQ ID NO:B which delineate certain polynucleotides of the invention that are also exemplary members of polynucleotide sequences that encode polypeptides of the invention (e.g., polypeptides containing amino acid sequences encoded by the polynucleotide sequences delineated in column six, and fragments and variants thereof).

[0014] Table 2 summarizes homology and features of some of the polypeptides of the invention. The first column provides a unique clone identifier, “Clone ID NO:Z”, corresponding to a cDNA disclosed in Table 1A. The second column provides the unique contig identifier, “Contig ID:” corresponding to contigs in Table 1A and allowing for correlation with the information in Table 1A. The third column provides the sequence identifier, “SEQ ID NO:X”, for the contig polynucleotide sequences. The fourth column provides the analysis method by which the homology/identity disclosed in the row was determined. Comparisons were made between polypeptides encoded by the polynucleotides of the invention and either a non-redundant protein database (herein referred to as “NR”), or a database of protein families (herein referred to as “PFAM”) as further described below. The fifth column provides a description of PFAM/NR hits having significant matches to a polyp eptide of the invention. Column six provides the accession number of the PFAM/NR hit disclosed in the fifth column. Column seven, “Score/Percent Identity”, provides a quality score or the percent identity, of the hit disclosed in column five. Columns 8 and 9, “NT From” and “NT To” respectively, delineate the polynucleotides in “SEQ ID NO:X” that encode a polypeptide having a significant match to the PFAM/NR database as disclosed in the fifth column. In specific embodiments, polypeptides of the invention comprise, or alternatively consist of, an amino acid sequence encoded by the polynucleotides in SEQ ID NO:X as delineated in columns 8 and 9, or fragments or variants thereof.

[0015] Table 3 provides polynucleotide sequences that may be disclaimed according to certain embodiments of the invention. The first column provides a unique clone identifier, “Clone ID NO:Z”, for a cDNA clone related to colorectal cancer associated contig sequences disclosed in Table 1A. The second column provides the sequence identifier, “SEQ ID NO:X”, for contig polynucleotide sequences disclosed in Table 1A. The third column provides the unique contig identifier, “Contig ID”, for contigs disclosed in Table 1A. The fourth column provides a unique integer ‘a’ where ‘a’ is any integer between 1 and the final nucleotide minus 15 of SEQ ID NO:X, represented as “Range of a”, and the fifth column provides a unique integer ‘b’ where ‘b’ is any integer between 15 and the final nucleotide of SEQ ID NO:X, represented as “Range of b”, where both a and b correspond to the positions of nucleotide residues shown in SEQ ID NO:X, and where b is greater than or equal to a+14. For each of the polynucleotides shown as SEQ ID NO:X, the uniquely defined integers can be substituted into the general formula of a−b, and used to describe polynucleotides which may be preferably excluded from the invention. In certain embodiments, preferably excluded from the polynucleotides of the invention (including polynucleotide fragments and variants as described herein and diagnostic and/or therapeutic uses based on these polynucleotides) are at least one, two, three, four, five, ten, or more of the polynucleotide sequence(s) having the accession number(s) disclosed in the sixth column of this Table (including for example, published sequence in connection with a particular BAC clone). In further embodiments, preferably excluded from the invention are the specific polynucleotide sequence(s) contained in the clones corresponding to at least one, two, three, four, five, ten, or more of the available material having the accession numbers identified in the sixth column of this Table (including for example, the actual sequence contained in an identified BAC clone).

[0016] Table 4 provides a key to the tissue/cell source identifier code disclosed in Table 1A, column 7. Column 1 provides the key to the tissue/cell source identifier code disclosed in Table 1A, Column 7. Columns 2-5 provide a description of the tissue or cell source. Codes corresponding to diseased tissues are indicated in column 6 with the word “disease”. The use of the word “disease” in column 6 is non-limiting. The tissue or cell source may be specific (e.g. a neoplasm), or may be disease-associated (e.g., a tissue sample from a normal portion of a diseased organ). Furthermore, tissues and/or cells lacking the “disease” designation may still be derived from sources directly or indirectly involved in a disease state or disorder, and therefore may have a further utility in that disease state or disorder. In numerous cases where the tissue/cell source is a library, column 7 identifies the vector used to generate the library.

[0017] Table 5 provides a key to the OMIM™ reference identification numbers disclosed in Table 1A, column 9. OMIM reference identification numbers (Column 1) were derived from Online Mendelian Inheritance in Man (Online Mendelian Inheritance in Man, OMIM™. McKusick-Nathans Institute for Genetic Medicine, Johns Hopkins University (Baltimore, Md.) and National Center for Biotechnology Information, National Library of Medicine, (Bethesda, Md.) 2000. World Wide Web URL: http://www.ncbi.nlm.nih.gov/omim/). Column 2 provides diseases associated with the cytologic band disclosed in Table 1A, column 8, as determined from the Morbid Map database.

[0018] Table 6 summarizes ATCC Deposits, Deposit dates, and ATCC designation numbers of deposits made with the ATCC in connection with the present application.

[0019] Table 7 shows the cDNA libraries sequenced, tissue source description, vector information and ATCC designation numbers relating to these cDNA libraries.

[0020] Table 8 provides a physical characterization of clones encompassed by the invention. The first column provides the unique clone identifier, “Clone ID NO:Z”, for certain cDNA clones of the invention, as described in Table 1A. The second column provides the size of the cDNA insert contained in the corresponding cDNA clone.

[0021] Definitions

[0022] The following definitions are provided to facilitate understanding of certain terms used throughout this specification.

[0023] In the present invention, “isolated” refers to material removed from its original environment (e.g., the natural environment if it is naturally occurring), and thus is altered “by the hand of man” from its natural state. For example, an isolated polynucleotide could be part of a vector or a composition of matter, or could be contained within a cell, and still be “isolated” because that vector, composition of matter, or particular cell is not the original environment of the polynucleotide. The term “isolated” does not refer to genomic or cDNA libraries, whole cell total or mRNA preparations, genomic DNA preparations (including those separated by electrophoresis and transferred onto blots), sheared whole cell genomic DNA preparations or other compositions where the art demonstrates no distinguishing features of the polynucleotide sequences of the present invention.

[0024] As used herein, a “polynucleotide” refers to a molecule having a nucleic acid sequence encoding SEQ ID NO:Y or a fragment or variant thereof; a nucleic acid sequence contained in SEQ ID NO:X (as described in column 3 of Table 1A) or the complement thereof; a cDNA sequence contained in Clone ID NO:Z (as described in column 1 of Table 1A and contained within a library deposited with the ATCC); a nucleotide sequence encoding the polypeptide encoded by a nucleotide sequence in SEQ ID NO:B as defined in column 6 of Table 1B or a fragment or variant thereof; or a nucleotide coding sequence in SEQ ID NO:B as defined in column 6 of Table 1B or the complement thereof. For example, the polynucleotide can contain the nucleotide sequence of the full length cDNA sequence, including the 5′ and 3′ untranslated sequences, the coding region, as well as fragments, epitopes, domains, and variants of the nucleic acid sequence. Moreover, as used herein, a “polypeptide” refers to a molecule having an amino acid sequence encoded by a polynucleotide of the invention as broadly defined (obviously excluding poly-Phenylalanine or poly-Lysine peptide sequences which result from translation of a polyA tail of a sequence corresponding to a cDNA).

[0025] As used herein, a “colorectal cancer antigen” refers collectively to any polynucleotide disclosed herein (e.g., a nucleic acid sequence contained in SEQ ID NO:X or the complement therof, or cDNA sequence contained in Clone ID NO:Z or a nucleotide sequence encoding the polypeptide encoded by a nucleotide sequence in SEQ ID NO:B as defined in column 6 of Table 1B, or a nucleotide coding sequence in SEQ ID NO:B as defined in column 6 of Table 1B or the complement thereof and fragments or variants thereof as described herein) or any polypeptide disclosed herein (e.g., an amino acid sequence contained in SEQ ID NO:Y, an amino acid sequence encoded by SEQ ID NO:X, or the complement thereof, an amino acid sequence encoded by the cDNA sequence contained in Clone ID NO:Z, an amino acid sequence encdoed by SEQ ID NO:B, or the complement thereof, and fragments or variants thereof as described herein). These colorectal cancer antigens have been determined to be predominantly expressed in colorectal tissues, including normal or diseased tissues (as shown in Table 1A column 7 and Table 4).

[0026] In the present invention, “SEQ ID NO:X” was often generated by overlapping sequences contained in multiple clones (contig analysis). A representative clone containing all or most of the sequence for SEQ ID NO:X is deposited at Human Genome Sciences, Inc. (HGS) in a catalogued and archived library. As shown, for example, in column 1 of Table 1A, each clone is identified by a cDNA Clone ID (identifier generally referred to herein as Clone ID NO:Z). Each Clone ID is unique to an individual clone and the Clone ID is all the information needed to retrieve a given clone from the HGS library. Furthermore, certain clones disclosed in this application have been deposited with the ATCC on Oct. 5, 2000, having the ATCC designation numbers PTA 2574 and PTA 2575; and on Jan. 5, 2001, having the depositor reference numbers TS-1, TS-2, AC-1, and AC-2. In addition to the individual cDNA clone deposits, most of the cDNA libraries from which the clones were derived were deposited at the American Type Culture Collection (hereinafter “ATCC”). Table 7 provides a list of the deposited cDNA libraries. One can use the Clone ID NO:Z to determine the library source by reference to Tables 6 and 7. Table 7 lists the deposited cDNA libraries by name and links each library to an ATCC Deposit. Library names contain four characters, for example, “HTWE.” The name of a cDNA clone (Clone ID NO:Z) isolated from that library begins with the same four characters, for example “HTWEP07”. As mentioned below, Table 1A correlates the Clone ID NO:Z names with SEQ ID NO:X. Thus, starting with an SEQ ID NO:X, one can use Tables 1, 6 and 7 to determine the corresponding Clone ID NO:Z, which library it came from and which ATCC deposit the library is contained in. Furthermore, it is possible to retrieve a given cDNA clone from the source library by techniques known in the art and described elsewhere herein. The ATCC is located at 10801 University Boulevard, Manassas, Va. 20110-2209, USA. The ATCC deposits were made pursuant to the terms of the Budapest Treaty on the international recognition of the deposit of microorganisms for the purposes of patent procedure.

[0027] In specific embodiments, the polynucleotides of the invention are at least 15, at least 30, at least 50, at least 100, at least 125, at least 500, or at least 1000 continuous nucleotides but are less than or equal to 300 kb, 200 kb, 100 kb, 50 kb, 15 kb, 10 kb, 7.5 kb, 5 kb, 2.5 kb, 2.0 kb, or 1 kb, in length. In a further embodiment, polynucleotides of the invention comprise a portion of the coding sequences, as disclosed herein, but do not comprise all or a portion of any intron. In another embodiment, the polynucleotides comprising coding sequences do not contain coding sequences of a genomic flanking gene (i.e., 5′ or 3′ to the gene of interest in the genome). In other embodiments, the polynucleotides of the invention do not contain the coding sequence of more than 1000, 500, 250, 100, 50, 25, 20, 15, 10, 5, 4, 3, 2, or 1 genomic flanking gene(s).

[0028] A “polynucleotide” of the present invention also includes those polynucleotides capable of hybridizing, under stringent hybridization conditions, to sequences contained in SEQ ID NO:X, or the complement thereof (e.g., the complement of any one, two, three, four, or more of the polynucleotide fragments described herein), the polynucleotide sequence delineated in columns 8 and 9 of Table 2 or the complement thereof, and/or cDNA sequences contained in Clone ID NO:Z (e.g., the complement of any one, two, three, four, or more of the polynucleotide fragments, or the cDNA clone within the pool of cDNA clones deposited with the ATCC, described herein) and/or the polynucleotide sequence delineated in column 6 of Table 1B or the complement thereof. “Stringent hybridization conditions” refers to an overnight incubation at 42 degree C in a solution comprising 50% formamide, 5× SSC (750 mM NaCl, 75 mM trisodium citrate), 50 mM sodium phosphate (pH 7.6), 5× Denhardt's solution, 10% dextran sulfate, and 20 μg/ml denatured, sheared salmon sperm DNA, followed by washing the filters in 0.1× SSC at about 65 degree C.

[0029] Also contemplated are nucleic acid molecules that hybridize to the polynucleotides of the present invention at lower stringency hybridization conditions. Changes in the stringency of hybridization and signal detection are primarily accomplished through the manipulation of formamide concentration (lower percentages of formamide result in lowered stringency), salt conditions, or temperature. For example, lower stringency conditions include an overnight incubation at 37 degree C in a solution comprising 6X SSPE (20× SSPE=3M NaCl; 0.2M NaH₂PO₄; 0.02M EDTA, pH 7.4), 0.5% SDS, 30% formamide, 100 ug/ml salmon sperm blocking DNA; followed by washes at 50 degree C with 1× SSPE, 0.1% SDS. In addition, to achieve even lower stringency, washes performed following stringent hybridization can be done at higher salt concentrations (e.g. 5× SSC).

[0030] Note that variations in the above conditions may be accomplished through the inclusion and/or substitution of alternate blocking reagents used to suppress background in hybridization experiments. Typical blocking reagents include Denhardt's reagent, BLOTTO, heparin, denatured salmon sperm DNA, and commercially available proprietary formulations. The inclusion of specific blocking reagents may require modification of the hybridization conditions described above, due to problems with compatibility.

[0031] Of course, a polynucleotide which hybridizes only to polyA+ sequences (such as any 3′ terminal polyA+ tract of a cDNA shown in the sequence listing), or to a complementary stretch of T (or U) residues, would not be included in the definition of “polynucleotide,” since such a polynucleotide would hybridize to any nucleic acid molecule containing a poly (A) stretch or the complement thereof (e.g., practically any double-stranded cDNA clone generated using oligo dT as a primer).

[0032] The polynucleotide of the present invention can be composed of any polyribonucleotide or polydeoxribonucleotide, which may be unmodified RNA or DNA or modified RNA or DNA. For example, polynucleotides can be composed of single- and double-stranded DNA, DNA that is a mixture of single- and double-stranded regions, single- and double-stranded RNA, and RNA that is mixture of single- and double-stranded regions, hybrid molecules comprising DNA and RNA that may be single-stranded or, more typically, double-stranded or a mixture of single- and double-stranded regions. In addition, the polynucleotide can be composed of triple-stranded regions comprising RNA or DNA or both RNA and DNA. A polynucleotide may also contain one or more modified bases or DNA or RNA backbones modified for stability or for other reasons. “Modified” bases include, for example, tritylated bases and unusual bases such as inosine. A variety of modifications can be made to DNA and RNA; thus, “polynucleotide” embraces chemically, enzymatically, or metabolically modified forms.

[0033] The polypeptide of the present invention can be composed of amino acids joined to each other by peptide bonds or modified peptide bonds, i.e., peptide isosteres, and may contain amino acids other than the 20 gene-encoded amino acids. The polypeptides may be modified by either natural processes, such as posttranslational processing, or by chemical modification techniques which are well known in the art. Such modifications are well described in basic texts and in more detailed monographs, as well as in a voluminous research literature. Modifications can occur anywhere in a polypeptide, including the peptide backbone, the amino acid side-chains and the amino or carboxyl termini. It will be appreciated that the same type of modification may be present in the same or varying degrees at several sites in a given polypeptide. Also, a given polypeptide may contain many types of modifications. Polypeptides may be branched, for example, as a result of ubiquitination, and they may be cyclic, with or without branching. Cyclic, branched, and branched cyclic polypeptides may result from posttranslation natural processes or may be made by synthetic methods. Modifications include acetylation, acylation, ADP-ribosylation, amidation, covalent attachment of flavin, covalent attachment of a heme moiety, covalent attachment of a nucleotide or nucleotide derivative, covalent attachment of a lipid or lipid derivative, covalent attachment of phosphotidylinositol, cross-linking, cyclization, disulfide bond formation, demethylation, formation of covalent cross-links, formation of cysteine, formation of pyroglutamate, formylation, gamma-carboxylation, glycosylation, GPI anchor formation, hydroxylation, iodination, methylation, myristoylation, oxidation, pegylation, proteolytic processing, phosphorylation, prenylation, racemization, selenoylation, sulfation, transfer-RNA mediated addition of amino acids to proteins such as arginylation, and ubiquitination. (See, for instance, PROTEINS—STRUCTURE AND MOLECULAR PROPERTIES, 2nd Ed., T. E. Creighton, W. H. Freeman and Company, New York (1993); POSTTRANSLATIONAL COVALENT MODIFICATION OF PROTEINS, B. C. Johnson, Ed., Academic Press, New York, pgs. 1-12 (1983); Seifter et al., Meth. Enzymol. 182:626-646 (1990); Rattan et al., Ann. N.Y. Acad. Sci. 663:48-62 (1992).)

[0034] “SEQ ID NO:X” refers to a polynucleotide sequence described, for example, in Tables 1 or 2, while “SEQ ID NO:Y” refers to a polypeptide sequence described in column 5 of Table 1A. SEQ ID NO:X is identified by an integer specified in column 3 of Table 1A. The polypeptide sequence SEQ ID NO:Y is a translated open reading frame (ORF) encoded by polynucleotide SEQ ID NO:X. “Clone ID NO:Z” refers to a cDNA clone described in column 1 of Table 1A.

[0035] “A polypeptide having biological activity” refers to a polypeptide exhibiting activity similar to, but not necessarily identical to, an activity of a polypeptide of the present invention, including mature forms, as measured in a particular biological assay, with or without dose dependency. In the case where dose dependency does exist, it need not be identical to that of the polypeptide, but rather substantially similar to the dose-dependence in a given activity as compared to the polypeptide of the present invention (i.e., the candidate polypeptide will exhibit greater activity or not more than about 25-fold less and, preferably, not more than about tenfold less activity, and most preferably, not more than about three-fold less activity relative to the polypeptide of the present invention).

[0036] Table 1A summarizes some of the polynucleotides encompassed by the invention (including contig sequences (SEQ ID NO:X) and clones (Clone ID NO:Z) and further summarizes certain characteristics of these polynucleotides and the polypeptides encoded thereby.

[0037] Polynucleotides and Polypeptides

TABLE 1A

| | | | | AA | | Tissue Distribution | | |
|---|---|---|---|---|---|---|---|---|
| | | | | SEQ | | Library code: count | | OMIM |
| Clone ID | Contig | SEQ ID | ORF | ID | | (see Table IV for | Cytologic | Disease |
| NO: Z | ID: | NO: X | (From-To) | NO: Y | Predicted Epitopes | Library Codes) | Band | Reference(s) |
| HCLHD88 | 929223 | 11 | 1-339 | 84 | Ser-9 to Trp-18, | H0676: 2 | | |
| | | | | | Pro-33 to Arg-44. | | | |
| HCQCR67 | 974592 | 12 | 1-252 | 85 | Pro-49 to Leu-55. | H0596: 3 | | |
| HCRMC26 | 913972 | 13 | 472-158 | 86 | Val-1 to Pro-25. | S0356: 2 and L0658: 1. | | |
| HCRMJ47 | 919757 | 14 | 112-537 | 87 | Asn-3 to Trp-18, | S0356: 2 | 4p16.3 | 134934, |
| | | | | | Gly-30 to Ser-35, | | | 134934, |
| | | | | | Pro-41 to Ser-51, | | | 134934, |
| | | | | | Pro-87 to Pro-100, | | | 134934, |
| | | | | | Gly-102 to Gly-108. | | | 134934, |
| | | | | | | | | 143100, |
| | | | | | | | | 180072, |
| | | | | | | | | 180072, |
| | | | | | | | | 194190, |
| | | | | | | | | 252800, |
| | | | | | | | | 252800, |
| | | | | | | | | 252800, |
| | | | | | | | | 600965 |
| HCRMP18 | 888719 | 15 | 3-623 | 88 | Pro-111 to Arg-117, | S0356: 2 | | |
| | | | | | Pro-122 to Glu-130. | | | |
| HCRMR08 | 958489 | 16 | 349-513 | 89 | | S0356: 2 | | |
| HCRMT41 | 974324 | 17 | 1-630 | 90 | | S0356: 3 | | |
| HCRND67 | 921398 | 18 | 2011-1673 | 91 | | S0356: 3 | | |
| HCRNF63 | 916063 | 19 | 201-1 | 92 | Gly-10 to Thr-15. | S0356: 2 and L0777: 1. | | |
| HCRNI04 | 849408 | 20 | 202-405 | 93 | Leu-53 to Gly-58. | S0356: 3 and L0747: 2. | | |
| HCRNK95 | 890458 | 21 | 87-242 | 94 | | S0356: 2 | 1 | |
| HCROM08 | 974135 | 22 | 1-204 | 95 | Cys-1 to Gly-6. | S0356: 3 | | |
| HCRON75 | 922386 | 23 | 3-200 | 96 | Val-20 to Asn-27. | S0356: 2 | 4 | |
| HCROV23 | 975245 | 24 | 324-644 | 97 | Pro-8 to Glu-17, | S0356: 4 | | |
| | | | | | Arg-24 to Arg-31, | | | |
| | | | | | Leu-39 to Pro-49, | | | |
| | | | | | Val-65 to Met-73. | | | |
| HCROZ66 | 909686 | 25 | 239-391 | 98 | Arg-7 to Lys-13. | S0356: 2 | | |
| HCRPU05 | 931081 | 26 | 1-267 | 99 | Ser-6 to Phe-19, | S0356: 2 | | |
| | | | | | Thr-31 to Lys-58, | | | |
| | | | | | Gly-73 to Met-81. | | | |
| HCRPZ11 | 973908 | 27 | 635-399 | 100 | | S0356: 3 | | |
| HCRQG35 | 954968 | 28 | 290-502 | 101 | Glu-1 to Tyr-6. | S0356: 1, S0376: 1 and | | |
| | | | | | | L0752: 1. | | |
| HWLMA84 | 929421 | 29 | 3-137 | 102 | | S0376: 2 | | |
| HWLNX76 | 887583 | 30 | 3-365 | 103 | | S0376: 2 | 7p15-p14 | 107776, |
| | | | | | | | | 138079, |
| | | | | | | | | 138079, |
| | | | | | | | | 139191, |
| | | | | | | | | 142959, |
| | | | | | | | | 153880, |
| | | | | | | | | 180104, |
| | | | | | | | | 203740, |
| | | | | | | | | 600994, |
| | | | | | | | | 601472, |
| | | | | | | | | 601649 |
| HWLRA85 | 965400 | 31 | 442-591 | 104 | | S0360: 2 | 5q31-q33 | 109690, |
| | | | | | | | | 109690, |
| | | | | | | | | 121050, |
| | | | | | | | | 131400, |
| | | | | | | | | 138040, |
| | | | | | | | | 153455, |
| | | | | | | | | 154500, |
| | | | | | | | | 159000, |
| | | | | | | | | 179095, |
| | | | | | | | | 180071, |
| | | | | | | | | 181460, |
| | | | | | | | | 192974, |
| | | | | | | | | 192974, |
| | | | | | | | | 222600, |
| | | | | | | | | 222600, |
| | | | | | | | | 222600, |
| | | | | | | | | 234000, |
| | | | | | | | | 272750, |
| | | | | | | | | 600807, |
| | | | | | | | | 601411, |
| | | | | | | | | 601596, |
| | | | | | | | | 601692, |
| | | | | | | | | 601692, |
| | | | | | | | | 601692, |
| | | | | | | | | 601692, |
| | | | | | | | | 602089, |
| | | | | | | | | 602121, |
| | | | | | | | | 602460 |
| HWLVF04 | 926880 | 32 | 363-479 | 105 | Thr-4 to Asp-9, | S0360: 2 | | |
| | | | | | Cys-21 to IIe-28. | | | |
| HWLVO06 | 933592 | 33 | 112-303 | 106 | | S0360: 2, L0655: 1 and | | |
| | | | | | | L0666: 1. | | |
| HWLVS52 | 925738 | 34 | 25-357 | 107 | | S0360: 3 | | |
| HWLXE16 | 975258 | 35 | 108-344 | 108 | Pro-19 to Phe-26, | S0360: 2 | | |
| | | | | | Pro-29 to Gly-34, | | | |
| | | | | | Pro-50 to Ser-55, | | | |
| | | | | | Gly-67 to Lys-73. | | | |
| HWLXO01 | 913808 | 36 | 218-514 | 109 | Val-20 to Pro-28, | S0360: 2 | | |
| | | | | | Glu-45 to Gly-53. | | | |
| HWLZB12 | 969262 | 37 | 55-270 | 110 | Thr-1 to Phe-11, | S0360: 2 and L0774: 1. | | |
| | | | | | Ala-28 to Pro-38. | | | |
| HWNBJ06 | 933578 | 38 | 3-314 | 111 | Cys-2 to Gly-7. | S0356: 1 and S0360: 1. | | |
| HWNBS06 | 933587 | 39 | 186-374 | 112 | Asp-1 to Lys-8, | S0360: 3 | | |
| | | | | | Lys-44 to Thr-51. | | | |
| HWNCY59 | 927487 | 40 | 237-73 | 113 | Ser-1 to Lys-6. | S0360: 2 | | |
| HWNEO76 | 929720 | 41 | 52-189 | 114 | | S0360: 2 | | |
| HWNEX05 | 928784 | 42 | 57-185 | 115 | | S0360: 2 | | |
| HWNFZ48 | 933522 | 43 | 3-191 | 116 | Gln-6 to Gln-11, | S0360: 2 | | |
| | | | | | Lys-51 to Phe-63. | | | |
| HWNGN09 | 961602 | 44 | 34-339 | 117 | Arg-19 to Val-28, | AR089: 2, AR061: 1 | | |
| | | | | | Ile-41 to Phe-58. | S0360: 2 | | |
| HWNHA12 | 969205 | 45 | 625-422 | 118 | Thr-7 to Val-12, | S0360: 3 | | |
| | | | | | Ser-20 to Leu-26. | | | |
| HWNHN10 | 961609 | 46 | 3-659 | 119 | Thr-4 to Ser-10, | L0779: 2 and S0360: 1. | | |
| | | | | | Glu-12 to Asn-18, | | | |
| | | | | | Pro-31 to Pro-43, | | | |
| | | | | | Glu-79 to Glu-97, | | | |
| | | | | | Gln-107 to Leu-112, | | | |
| | | | | | Ser-136 to Trp-143, | | | |
| | | | | | Pro-150 to Trp-172, | | | |
| | | | | | Pro-183 to Cys-195, | | | |
| | | | | | Thr-204 to Lys-212. | | | |
| HWNDU11 | 965382 | 47 | 40-303 | 120 | Gly-1 to Val-8, | S0360: 1 and L0777: 1. | | |
| | | | | | Pro-17 to Cys-23, | | | |
| | | | | | Cys-38 to Thr-44, | | | |
| | | | | | Arg-76 to Asn-85. | | | |
| HWNCN05 | 928791 | 48 | 113-811 | 121 | Gly-28 to Gly-34, | L0750: 2, S0360: 1 and | | |
| | | | | | Pro-39 to Phe-46, | L0759: 1. | | |
| | | | | | Pro-75 to Asp-90. | | | |
| HWNBX05 | 928800 | 49 | 298-414 | 122 | Cys-22 to Ala-31. | S0360: 1 and L0439: 1. | | |
| HWNBL12 | 969222 | 50 | 3-86 | 123 | | S0360: 1, L0717: 1, | | |
| | | | | | | L0777: 1 and L0755: 1. | | |
| HWNAL06 | 933591 | 51 | 294-425 | 124 | Thr-12 to Gln-22, | S0360: 1 and L0759: 1. | | |
| | | | | | Thr-33 to Ser-41. | | | |
| HWNAE01 | 914082 | 52 | 492-782 | 125 | Glu-1 to Leu-12, | L0748: 3, L0743: 2, | | |
| | | | | | Arg-83 to Gln-97. | L0749: 2 and S0360: 1. | | |
| HWMBY62 | 937234 | 53 | 135-479 | 126 | | S0376: 1 and L0749: 1. | 18 | |
| HWMBM89 | 968984 | 54 | 161-54 | 127 | | L0747: 2, L0755: 2, | | |
| | | | | | | S0376: 1,L0369: 1, | | |
| | | | | | | L0775: 1, L0777: 1 and | | |
| | | | | | | L0759: 1. | | |
| HWLXJ10 | 963328 | 55 | 44-283 | 128 | Arg-15 to Ser-26. | S0360: 1 and L0803: 1. | | |
| HWLVU33 | 972979 | 56 | 2-340 | 129 | Ser-50 to Pro-56, | S0360: 1 and L0758: 1. | | |
| | | | | | Pro-68 to Val-77. | | | |
| HWLVK02 | 922696 | 57 | 412-212 | 130 | Ser-29 to Pro-34, | L0755: 3, L0776: 2, | | |
| | | | | | Arg-47 to Thr-62. | S0360: 1, L0763: 1 and | | |
| | | | | | | L0756: 1. | | |
| HWLUY15 | 874966 | 58 | 156-308 | 131 | | S0360: 1, L0776: 1 and | | |
| | | | | | | L0758: 1. | | |
| HWLQS70 | 933799 | 59 | 379-528 | 132 | Ala-5 to Met-10, | L0766: 4, S0360: 1, | | |
| | | | | | Ser-44 to Arg-50. | L0771: 1 and L0731: 1. | | |
| HWLQA64 | 918932 | 60 | 96-164 | 133 | | S0360: 1 and L0439: 1. | | |
| HWLOL02 | 918320 | 61 | 191-301 | 134 | | S0376: 1, L0521: 1, | | |
| | | | | | | L0750: 1 and L0779: 1. | | |
| HWLOB68 | 908500 | 62 | 6-401 | 135 | | AR061: 1, AR089: 1 | | |
| | | | | | | S0376: 1 and L0740: 1. | | |
| HWLNC88 | 875790 | 63 | 387-572 | 136 | Thr-12 to Phe-19, | L0803: 2, S0376: 1, | | |
| | | | | | Lys-57 to Lys-62. | L0763: 1 and L0759: 1. | | |
| HWLNA36 | 974863 | 64 | 607-317 | 137 | | L0794: 3, L0803: 2, | | |
| | | | | | | S0376: 1, L0774: 1, | | |
| | | | | | | L0665: 1 and L0731: 1. | | |
| HWLMI16 | 918726 | 65 | 236-400 | 138 | | S0376: 1 and L0759: 1. | | |
| HKCTA23 | 877228 | 66 | 171-305 | 139 | Phe-9 to Tyr-21. | L0754: 2 and H0205: | | |
| | | | | | | 1. | | |
| HCYBO59 | 520114 | 67 | 68-385 | 140 | Glu-19 to Arg-32, | T0114: 1 and L0748: 1. | | |
| | | | | | Glu-54 to His-78, | | | |
| | | | | | Ser-84 to Gly-95. | | | |
| HCYBL79 | 888275 | 68 | 374-144 | 141 | Leu-9 to His-16. | L0779: 2 and T0114: 1. | | |
| HCRQB03 | 922880 | 69 | 274-546 | 142 | Asp-18 to Asn-26, | S0356: 1 and L0772: 1. | | |
| | | | | | His-28 to Gly-36, | | | |
| | | | | | Cys-67 to Gln-78. | | | |
| HCRPQ40 | 881408 | 70 | 641-495 | 143 | Phe-29 to Lys-34. | L0517: 2, S0356: 1, | | |
| | | | | | | L0021: 1, L0527: 1, | | |
| | | | | | | L0745: 1 and L0758: 1. | | |
| HCRPE30 | 910021 | 71 | 49-123 | 144 | | S0356: 1 | | |
| HCROA43 | 948286 | 72 | 1-810 | 145 | | AR050: 40, AR054: | | |
| | | | | | | 32, AR051: 32, AR061: | | |
| | | | | | | 1, AR089: 1 | | |
| | | | | | | S0356: 1 | | |
| HCRNR03 | 922819 | 73 | 1-456 | 146 | | L0752: 2, S0356: 1, | | |
| | | | | | | L0766: 1, L0438: 1 and | | |
| | | | | | | L0439: 1. | | |
| HCRND06 | 934631 | 74 | 2-235 | 147 | | S0356: 1, L0803: 1, | | |
| | | | | | | L0774: 1, L0776: 1, | | |
| | | | | | | L0438: 1, L0439: 1 and | | |
| | | | | | | L0759: 1. | | |
| HCRMX10 | 963663 | 75 | 86-409 | 148 | Lys-1 to Pro-19, | L0776: 3, S0356: 1, | | |
| | | | | | Phe-23 to Lys-28, | L0805: 1 and L0757: 1. | | |
| | | | | | Gly-35 to Trp-42, | | | |
| | | | | | Ala-50 to Leu-57, | | | |
| | | | | | Ala-102 to His-107. | | | |
| HCRMG11 | 965918 | 76 | 12-284 | 149 | | S0356: 1 and L0779: 1. | | |
| HCQDE22 | 949991 | 77 | 218-745 | 150 | Ile-132 to Gly-138, | AR061: 6, AR089: 2 | | |
| | | | | | Phe-149 to Thr-154. | H0596: 1 and L0749: | | |
| | | | | | | 1. | | |
| HCQDA13 | 908299 | 78 | 225-422 | 151 | Phe-26 to Asn-33. | L0748: 2, H0596: 1 | | |
| | | | | | | and L0776: 1. | | |
| HCQCQ76 | 953491 | 79 | 199-411 | 152 | | L0777: 2, H0596: 1, | | |
| | | | | | | L0768: 1 and L0756: 1. | | |
| HCQAC71 | 951844 | 80 | 240-443 | 153 | Ser-16 to Cys-22, | H0263: 1 and L0759: | | |
| | | | | | Pro-35 to Cys-44. | 1. | | |
| HCLHE01 | 914341 | 81 | 436-633 | 154 | | L0740: 2, H0676: 1, | | |
| | | | | | | L0371: 1, L0748: 1 and | | |
| | | | | | | L0608: 1. | | |
| H2LAM15 | 767606 | 82 | 3-584 | 155 | | T0115: 1,L0769: 1 and | | |
| | | | | | | L0786: 1. | | |
| H2CBP41 | 923006 | 83 | 51-515 | 156 | Arg-6 to Thr-12. | L0747: 2 and T0110: 1. | | |

[0038] The first column in Table 1A provides a unique “Clone ID NO:Z” for a cDNA clone related to each contig sequence disclosed in Table 1A. This clone ID references the cDNA clone which contains at least the 5′ most sequence of the assembled contig, and at least a portion of SEQ ID NO:X was determined by directly sequencing the referenced clone. The reference clone may have more sequence than described in the sequence listing or the clone may have less. In the vast majority of cases, however, the clone is believed to encode a full-length polypeptide. In the case where a clone is not full-length, a full-length cDNA can be obtained by methods known in the art and/or as described elsewhere herein.

[0039] The second column in Table 1A provides a unique “Contig ID” identification for each contig sequence. The third column provides the “SEQ ID NO:X” identifier for each of the colorectal cancer associated contig polynucleotide sequences disclosed in Table 1A. The fourth column, “ORF (From-To)”, provides the location (i.e., nucleotide position numbers) within the polynucleotide sequence “SEQ ID NO:X” that delineate the preferred open reading frame (ORF) shown in the sequence listing and referenced in Table 1A, column 5, as SEQ ID NO:Y. Where the nucleotide position number “To” is lower than the nucleotide position number “From”, the preferred ORF is the reverse complement of the referenced polynucleotide sequence.

[0040] The fifth column in Table 1A provides the corresponding SEQ ID NO:Y for the polypeptide sequence encoded by the preferred ORF delineated in column 4. In one embodiment, the invention provides an amino acid sequence comprising, or alternatively consisting of, a polypeptide encoded by the portion of SEQ ID NO:X delineated by “ORF (From-To)”. Also provided are polynucleotides encoding such amino acid sequences and the complementary strand thereto.

[0041] Column 6 in Table 1A lists residues comprising epitopes contained in the polypeptides encoded by the preferred ORF (SEQ ID NO:Y), as predicted using the algorithm of Jameson and Wolf, (1988) Comp. Appl. Biosci. 4:181-186. The Jameson-Wolf antigenic analysis was performed using the computer program PROTEAN (Version 3.11 for the Power MacIntosh, DNASTAR, Inc., 1228 South Park Street Madison, Wis.). In specific embodiments, polypeptides of the invention comprise, or alternatively consist of, at least one, two, three, four, five or more of the predicted epitopes as described in Table 1A. It will be appreciated that depending on the analytical criteria used to predict antigenic determinants, the exact address of the determinant may vary slightly.

[0042] Column 7 in Table 1A provides an expression profile and library code: count for each of the contig sequences (SEQ ID NO:X) disclosed in Table 1A, which can routinely be combined with the information provided in Table 4 and used to determine the normal or diseased tissues, cells, and/or cell line libraries which predominantly express the polynucleotides of the invention. The first number in column 7 (preceding the colon), represents the tissue/cell source identifier code corresponding to the code and description provided in Table 4. For those identifier codes in which the first two letters are not “AR”, the second number in column 7 (following the colon) represents the number of times a sequence corresponding to the reference polynucleotide sequence was identified in the tissue/cell source. Those tissue/cell source identifier codes in which the first two letters are “AR” designate information generated using DNA array technology. Utilizing this technology, cDNAs were amplified by PCR and then transferred, in duplicate, onto the array. Gene expression was assayed through hybridization of first strand cDNA probes to the DNA array. cDNA probes were generated from total RNA extracted from a variety of different tissues and cell lines. Probe synthesis was performed in the presence of ³³P dCTP, using oligo(dT) to prime reverse transcription. After hybridization, high stringency washing conditions were employed to remove non-specific hybrids from the array. The remaining signal, emanating from each gene target, was measured using a Phosphorimager. Gene expression was reported as Phosphor Stimulating Luminescence (PSL) which reflects the level of phosphor signal generated from the probe hybridized to each of the gene targets represented on the array. A local background signal subtraction was performed before the total signal generated from each array was used to normalize gene expression between the different hybridizations. The value presented after “[array code]:” represents the mean of the duplicate values, following background subtraction and probe normalization. One of skill in the art could routinely use this information to identify normal and/or diseased tissue(s) which show a predominant expression pattern of the corresponding polynucleotide of the invention or to identify polynucleotides which show predominant and/or specific tissue and/or cell expression. The sequences disclosed herein have been determined to be predominantly expressed in colon and/or rectal tissues, including normal and diseased colorectal tissues (See Table 1A, column 7 and Table 4).

[0043] Column 8 in Table 1A provides a chromosomal map location for certain polynucleotides of the invention. Chromosomal location was determined by finding exact matches to EST and cDNA sequences contained in the NCBI (National Center for Biotechnology Information) UniGene database. Each sequence in the UniGene database is assigned to a “cluster”; all of the ESTs, cDNAs, and STSs in a cluster are believed to be derived from a single gene. Chromosomal mapping data is often available for one or more sequence(s) in a UniGene cluster; this data (if consistent) is then applied to the cluster as a whole. Thus, it is possible to infer the chromosomal location of a new polynucleotide sequence by determining its identity with a mapped UniGene cluster.

[0044] A modified version of the computer program BLASTN (Altshul et al., J. Mol. Biol. 215:403-410 (1990), and Gish et al., Nat. Genet. 3:266-272 (1993)) was used to search the UniGene database for EST or cDNA sequences that contain exact or near-exact matches to a polynucleotide sequence of the invention (the ‘Query’). A sequence from the UniGene database (the ‘Subject’) was said to be an exact match if it contained a segment of 50 nucleotides in length such that 48 of those nucleotides were in the same order as found in the Query sequence. If all of the matches that met this criteria were in the same UniGene cluster, and mapping data was available for this cluster, it is indicated in Table 1A under the heading “Cytologic Band”. Where a cluster had been further localized to a distinct cytologic band, that band is disclosed; where no banding information was available, but the gene had been localized to a single chromosome, the chromosome is disclosed.

[0045] Once a presumptive chromosomal location was determined for a polynucleotide of the invention, an associated disease locus was identified by comparison with a database of diseases which have been experimentally associated with genetic loci. The database used was the Morbid Map, derived from OMIM™ (supra). If the putative chromosomal location of a polynucleotide of the invention (Query sequence) was associated with a disease in the Morbid Map database, an OMIM reference identification number was noted in column 9, Table 1A, labeled “OMIM Disease Reference(s)”. Table 5 is a key to the OMIM reference identification numbers (column 1), and provides a description of the associated disease in Column 2.

TABLE 1B

| Clone ID | SEQ ID | CONTIG | | SEQ ID | EXON |
|---|---|---|---|---|---|
| NO: Z | NO: X | ID: | BAC ID: A | NO: B | From-To |
| HCQCR67 | 12 | 974592 | AC027393 | 157 | 1-721 |
| | | | | | 871-931 |
| | | | | | 3873-3972 |
| HCQCR67 | 12 | 974592 | AC010997 | 158 | 1-721 |
| | | | | | 871-931 |
| | | | | | 3873-3972 |
| HCRMC26 | 13 | 913972 | AC019121 | 159 | 1-888 |
| HCRMC26 | 13 | 913972 | AP002770 | 160 | 1-729 |
| HCRMC26 | 13 | 913972 | AC019121 | 161 | 1-609 |
| HCRMC26 | 13 | 913972 | AP002770 | 162 | 1-609 |
| HCRMR08 | 16 | 958489 | AC024554 | 163 | 1-106 |
| | | | | | 215-550 |
| | | | | | 554-974 |
| | | | | | 1058-1205 |
| | | | | | 1302-1434 |
| HCRNF63 | 19 | 916063 | AL356385 | 164 | 1-2271 |
| HCRNF63 | 19 | 916063 | AC016501 | 165 | 1-2271 |
| HCRNF63 | 19 | 916063 | AL356385 | 166 | 1-468 |
| HCRNF63 | 19 | 916063 | AC016501 | 167 | 1-480 |
| HCRNI04 | 20 | 849408 | AC023257 | 168 | 1-362 |
| HCRNI04 | 20 | 849408 | AC023257 | 169 | 1-157 |
| HCRPU05 | 26 | 931081 | AL139376 | 170 | 1-515 |
| HCRQG35 | 28 | 954968 | AC026676 | 171 | 1-1626 |
| | | | | | 1827-3829 |
| | | | | | 4165-6488 |
| | | | | | 6710-7840 |
| | | | | | 8251-8973 |
| | | | | | 9301-9417 |
| HCRQG35 | 28 | 954968 | AC026676 | 172 | 1-797 |
| HWLMA84 | 29 | 929421 | AF067844 | 173 | 1-105 |
| | | | | | 384-608 |
| | | | | | 5513-5866 |
| | | | | | 7398-7789 |
| | | | | | 8738-9155 |
| | | | | | 13079-20268 |
| HWLMA84 | 29 | 929421 | AF067844 | 174 | 1-169 |
| HWLVF04 | 32 | 926880 | AC016566 | 175 | 1-719 |
| HWLVF04 | 32 | 926880 | AC015517 | 176 | 1-719 |
| HWLVO06 | 33 | 933592 | AC004460 | 177 | 1-1009 |
| HWLVS52 | 34 | 925738 | AC011084 | 178 | 1-537 |
| HWLVS52 | 34 | 925738 | AC011084 | 179 | 1-510 |
| HWLXO01 | 36 | 913808 | AF131215 | 180 | 1-908 |
| | | | | | 964-1453 |
| | | | | | 2495-3785 |
| HWLXO01 | 36 | 913808 | AF131215 | 181 | 1-699 |
| | | | | | 953-1111 |
| | | | | | 1121-1575 |
| | | | | | 1768-2006 |
| | | | | | 2115-2695 |
| HWLXO01 | 36 | 913808 | AF131215 | 182 | 1-493 |
| HWNEO76 | 41 | 929720 | AC008579 | 183 | 1-456 |
| | | | | | 470-569 |
| | | | | | 661-946 |
| | | | | | 1439-2414 |
| | | | | | 2426-2477 |
| | | | | | 3248-4447 |
| | | | | | 4711-6731 |
| HWNEO76 | 41 | 929720 | AC074130 | 184 | 1-1035 |
| HWNEO76 | 41 | 929720 | AC005752 | 185 | 1-976 |
| | | | | | 988-1039 |
| HWNEO76 | 41 | 929720 | AC008579 | 186 | 1-300 |
| HWNEO76 | 41 | 929720 | AC074130 | 187 | 1-286 |
| HWNEO76 | 41 | 929720 | AC005752 | 188 | 1-1201 |
| | | | | | 2407-3485 |
| HWNEO76 | 41 | 929720 | AC005752 | 189 | 1-286 |
| HWNEX05 | 42 | 928784 | AC053497 | 190 | 1-300 |
| HWNEX05 | 42 | 928784 | AL356356 | 191 | 1-779 |
| HWNEX05 | 42 | 928784 | AL356356 | 192 | 1-551 |
| | | | | | 1445-1910 |
| | | | | | 2368-2544 |
| HWNFZ48 | 43 | 933522 | AL135927 | 193 | 1-626 |
| | | | | | 2442-2539 |
| | | | | | 2809-3257 |
| | | | | | 3990-4295 |
| | | | | | 4798-5204 |
| | | | | | 5363-5971 |
| | | | | | 7472-7829 |
| | | | | | 13029-13568 |
| | | | | | 15949-16109 |
| | | | | | 16350-16527 |
| | | | | | 18198-18335 |
| | | | | | 19730-19862 |
| | | | | | 20135-20311 |
| | | | | | 20516-20654 |
| | | | | | 21018-21770 |
| | | | | | 21818-22107 |
| | | | | | 22245-22361 |
| | | | | | 22384-22566 |
| | | | | | 22726-25423 |
| HWNFZ48 | 43 | 933522 | AC007227 | 194 | 1-626 |
| | | | | | 2809-3259 |
| | | | | | 3992-4297 |
| | | | | | 4800-5206 |
| | | | | | 5365-5973 |
| | | | | | 7474-7831 |
| | | | | | 12842-12947 |
| | | | | | 13031-13570 |
| | | | | | 15951-16111 |
| | | | | | 16425-16579 |
| | | | | | 18200-18337 |
| | | | | | 19732-19864 |
| | | | | | 20137-20313 |
| | | | | | 20518-20656 |
| | | | | | 21020-21772 |
| | | | | | 21820-22109 |
| | | | | | 22247-22363 |
| | | | | | 22386-22568 |
| | | | | | 22728-25424 |
| HWNFZ48 | 43 | 933522 | AL135927 | 195 | 1-490 |
| HWNFZ48 | 43 | 933522 | AL135927 | 196 | 1-591 |
| HWNFZ48 | 43 | 933522 | AC007227 | 197 | 1-591 |
| HWNFZ48 | 43 | 933522 | AC007227 | 198 | 1-490 |
| HWNHA12 | 45 | 969205 | AL354720 | 199 | 1-729 |
| HWNHA12 | 45 | 969205 | AL354720 | 200 | 1-531 |
| HWNHA12 | 45 | 969205 | AL354720 | 201 | 1-463 |
| HWNDU11 | 47 | 965382 | AC025332 | 202 | 1-723 |
| | | | | | 734-3253 |
| HWNDU11 | 47 | 965382 | AC073532 | 203 | 1-1075 |
| | | | | | 1086-3606 |
| HWNDU11 | 47 | 965382 | AC025332 | 204 | 1-155 |
| HWNDU11 | 47 | 965382 | AC073532 | 205 | 1-1146 |
| HWNDU11 | 47 | 965382 | AC073532 | 206 | 1-155 |
| HWNBX05 | 49 | 928800 | AC010087 | 207 | 1-393 |
| HWNBX05 | 49 | 928800 | AC010087 | 208 | 1-144 |
| | | | | | 1707-1853 |
| | | | | | 4385-4566 |
| | | | | | 4631-5019 |
| | | | | | 5057-7386 |
| HWNBX05 | 49 | 928800 | AC010087 | 209 | 1-352 |
| HWNBL12 | 50 | 969222 | AC023303 | 210 | 1-621 |
| HWNBL12 | 50 | 969222 | AC006344 | 211 | 1-1064 |
| | | | | | 3781-3919 |
| | | | | | 7097-7283 |
| | | | | | 7498-7654 |
| | | | | | 8961-9886 |
| | | | | | 9977-10228 |
| | | | | | 11518-11855 |
| | | | | | 12753-13066 |
| | | | | | 13220-13320 |
| | | | | | 16177-16549 |
| | | | | | 17374-18638 |
| | | | | | 19012-19459 |
| | | | | | 19592-20212 |
| | | | | | 20305-20887 |
| | | | | | 21490-22435 |
| | | | | | 22865-24404 |
| | | | | | 25474-25626 |
| | | | | | 28348-28745 |
| | | | | | 29599-35135 |
| | | | | | 35487-35810 |
| | | | | | 37085-37167 |
| | | | | | 37235-37611 |
| | | | | | 38767-38872 |
| | | | | | 39677-39970 |
| | | | | | 40000-40446 |
| | | | | | 40720-40950 |
| | | | | | 41059-41784 |
| | | | | | 42358-43037 |
| | | | | | 44704-44803 |
| | | | | | 45365-45659 |
| | | | | | 46309-46749 |
| | | | | | 46889-47004 |
| | | | | | 47314-48426 |
| | | | | | 48610-49113 |
| | | | | | 49295-49473 |
| | | | | | 49579-50118 |
| | | | | | 50341-50536 |
| | | | | | 52197-52445 |
| | | | | | 52505-52646 |
| | | | | | 52917-52973 |
| | | | | | 54006-54137 |
| | | | | | 54212-54777 |
| | | | | | 55274-55696 |
| | | | | | 56489-56695 |
| HWNBL12 | 50 | 969222 | AC023303 | 212 | 1-583 |
| HWNBL12 | 50 | 969222 | AC023303 | 213 | 1-448 |
| HWNAL06 | 51 | 933591 | AC022133 | 214 | 1-481 |
| HWNAL06 | 51 | 933591 | AC022133 | 215 | 1-520 |
| HWNAE01 | 52 | 914082 | AC027126 | 216 | 1-1577 |
| HWNAE01 | 52 | 914082 | AC016333 | 217 | 1-1577 |
| HWNAE01 | 52 | 914082 | AC016333 | 218 | 1-412 |
| HWNAE01 | 52 | 914082 | AC016333 | 219 | 1-490 |
| HWMBY62 | 53 | 937234 | AC011123 | 220 | 1-1680 |
| HWMBY62 | 53 | 937234 | AP001562 | 221 | 1-1678 |
| HWMBY62 | 53 | 937234 | AC011123 | 222 | 1-381 |
| HWMBY62 | 53 | 937234 | AC011123 | 223 | 1-240 |
| HWMBY62 | 53 | 937234 | AP001562 | 224 | 1-240 |
| HWMBY62 | 53 | 937234 | AP001562 | 225 | 1-381 |
| HWLVU33 | 56 | 972979 | AC016757 | 226 | 1-606 |
| HWLVU33 | 56 | 972979 | AC016757 | 227 | 1-79 |
| | | | | | 266-405 |
| | | | | | 2358-2432 |
| | | | | | 3756-3966 |
| HWLVK02 | 57 | 922696 | AC026691 | 228 | 1-1784 |
| HWLUY15 | 58 | 874966 | AC021094 | 229 | 1-460 |
| HWLUY15 | 58 | 874966 | AC020664 | 230 | 1-460 |
| HWLUY15 | 58 | 874966 | AC021094 | 231 | 1-650 |
| HWLUY15 | 58 | 874966 | AC020664 | 232 | 1-651 |
| HWLUY15 | 58 | 874966 | AC020664 | 233 | 1-285 |
| HWLQS70 | 59 | 933799 | AL161797 | 234 | 1-1465 |
| | | | | | 6193-6379 |
| | | | | | 7070-7221 |
| HWLQS70 | 59 | 933799 | AL161797 | 235 | 1-427 |
| HWLQA64 | 60 | 918932 | AC005575 | 236 | 1-2866 |
| HWLQA64 | 60 | 918932 | AC026272 | 237 | 1-2866 |
| HWLQA64 | 60 | 918932 | AC005575 | 238 | 1-478 |
| HWLQA64 | 60 | 918932 | AC005575 | 239 | 1-394 |
| HWLQA64 | 60 | 918932 | AC026272 | 240 | 1-394 |
| HWLQA64 | 60 | 918932 | AC026272 | 241 | 1-478 |
| HWLOL02 | 61 | 918320 | AC068942 | 242 | 1-647 |
| HWLOL02 | 61 | 918320 | AC016590 | 243 | 1-646 |
| HWLOL02 | 61 | 918320 | AC012309 | 244 | 1-647 |
| HWLOL02 | 61 | 918320 | AC068942 | 245 | 1-333 |
| HWLOL02 | 61 | 918320 | AC016590 | 246 | 1-333 |
| HWLOL02 | 61 | 918320 | AC012309 | 247 | 1-91 |
| | | | | | 978-1241 |
| | | | | | 1533-1729 |
| | | | | | 5127-5589 |
| | | | | | 6986-7247 |
| | | | | | 8381-8520 |
| | | | | | 10408-10678 |
| | | | | | 10698-10822 |
| | | | | | 11589-11689 |
| | | | | | 15587-15825 |
| | | | | | 15891-15950 |
| | | | | | 16712-17044 |
| | | | | | 17364-17431 |
| HWLNC88 | 63 | 875790 | AC074274 | 248 | 1-729 |
| HWLNC88 | 63 | 875790 | AC074274 | 249 | 1-510 |
| HWLMI16 | 65 | 918726 | AC067952 | 250 | 1-2563 |
| HWLMI16 | 65 | 918726 | AC025108 | 251 | 1-2563 |
| HWLMI16 | 65 | 918726 | AC025108 | 252 | 1-90 |
| | | | | | 813-916 |
| | | | | | 1268-1460 |
| | | | | | 3661-4187 |
| HKCTA23 | 66 | 877228 | AC009293 | 253 | 1-1453 |
| HKCTA23 | 66 | 877228 | AC036167 | 254 | 1-1455 |
| HKCTA23 | 66 | 877228 | AC009293 | 255 | 1-415 |
| HKCTA23 | 66 | 877228 | AC036167 | 256 | 1-415 |
| HCYBL79 | 68 | 888275 | AL162261 | 257 | 1-454 |
| HCYBL79 | 68 | 888275 | AC015618 | 258 | 1-453 |
| HCYBL79 | 68 | 888275 | AL356957 | 259 | 1-2000 |
| | | | | | 2791-3036 |
| HCYBL79 | 68 | 888275 | AL358813 | 260 | 1-154 |
| | | | | | 168-272 |
| | | | | | 2427-2570 |
| | | | | | 3307-3955 |
| | | | | | 4488-4638 |
| | | | | | 4640-5508 |
| | | | | | 5813-6298 |
| | | | | | 6577-8556 |
| HCYBL79 | 68 | 888275 | AC018593 | 261 | 1-154 |
| | | | | | 168-272 |
| | | | | | 2428-2571 |
| | | | | | 3308-3956 |
| | | | | | 4489-4639 |
| | | | | | 4641-5509 |
| | | | | | 5814-6299 |
| | | | | | 6578-8557 |
| HCYBL79 | 68 | 888275 | AC024468 | 262 | 1-269 |
| | | | | | 2419-2560 |
| | | | | | 3305-3786 |
| | | | | | 4474-5582 |
| | | | | | 5736-6454 |
| | | | | | 6554-8813 |
| | | | | | 9717-9903 |
| HCYBL79 | 68 | 888275 | AL162612 | 263 | 1-155 |
| | | | | | 168-272 |
| | | | | | 2427-2570 |
| | | | | | 3309-3957 |
| | | | | | 4477-4628 |
| | | | | | 4630-4944 |
| | | | | | 4986-5499 |
| | | | | | 5827-6313 |
| | | | | | 6597-8596 |
| | | | | | 9375-9620 |
| HCYBL79 | 68 | 888275 | AL355800 | 264 | 1-453 |
| HCYBL79 | 68 | 888275 | AL137798 | 265 | 1-455 |
| HCYBL79 | 68 | 888275 | AL021920 | 266 | 1-455 |
| HCYBL79 | 68 | 888275 | AL355149 | 267 | 1-454 |
| HCYBL79 | 68 | 888275 | AC021338 | 268 | 1-446 |
| HCYBL79 | 68 | 888275 | AL137802 | 269 | 1-454 |
| HCYBL79 | 68 | 888275 | AL356957 | 270 | 1-379 |
| HCYBL79 | 68 | 888275 | AL358813 | 271 | 1-246 |
| HCYBL79 | 68 | 888275 | AL162261 | 272 | 1-901 |
| | | | | | 1073-1200 |
| | | | | | 1220-1344 |
| | | | | | 1713-2288 |
| HCYBL79 | 68 | 888275 | AC018593 | 273 | 1-579 |
| HCYBL79 | 68 | 888275 | AC015618 | 274 | 1-475 |
| | | | | | 1079-1217 |
| | | | | | 1702-2277 |
| HCYBL79 | 68 | 888275 | AL356957 | 275 | 1-485 |
| HCYBL79 | 68 | 888275 | AL358813 | 276 | 1-579 |
| HCYBL79 | 68 | 888275 | AC018593 | 277 | 1-246 |
| HCYBL79 | 68 | 888275 | AC024468 | 278 | 1-478 |
| HCYBL79 | 68 | 888275 | AC024468 | 279 | 1-835 |
| HCYBL79 | 68 | 888275 | AL162612 | 280 | 1-379 |
| HCYBL79 | 68 | 888275 | AL162612 | 281 | 1-579 |
| HCYBL79 | 68 | 888275 | AL355800 | 282 | 1-474 |
| | | | | | 1078-1216 |
| | | | | | 1701-2276 |
| HCYBL79 | 68 | 888275 | AL137798 | 283 | 1-266 |
| HCYBL79 | 68 | 888275 | AL137798 | 284 | 1-376 |
| HCYBL79 | 68 | 888275 | AL021920 | 285 | 1-266 |
| HCYBL79 | 68 | 888275 | AL021920 | 286 | 1-376 |
| HCYBL79 | 68 | 888275 | AL355149 | 287 | 1-474 |
| | | | | | 1082-1212 |
| | | | | | 1700-2275 |
| HCYBL79 | 68 | 888275 | AC021338 | 288 | 1-716 |
| HCYBL79 | 68 | 888275 | AL137802 | 289 | 1-474 |
| | | | | | 1082-1212 |
| | | | | | 1700-2275 |
| HCRQB03 | 69 | 922880 | AC011676 | 290 | 1-574 |
| HCRQB03 | 69 | 922880 | AC011676 | 291 | 1-198 |
| HCRPQ40 | 70 | 881408 | AC055713 | 292 | 1-110 |
| | | | | | 2616-2733 |
| | | | | | 4199-6427 |
| HCRPQ40 | 70 | 881408 | AC048340 | 293 | 1-2230 |
| HCRPQ40 | 70 | 881408 | AC055713 | 294 | 1-247 |
| HCRPQ40 | 70 | 881408 | AC048340 | 295 | 1-118 |
| HCRPQ40 | 70 | 881408 | AC055713 | 296 | 1-105 |
| HCRPQ40 | 70 | 881408 | AC048340 | 297 | 1-246 |
| HCROA43 | 72 | 948286 | AC074373 | 298 | 1-55 |
| | | | | | 130-242 |
| | | | | | 323-415 |
| | | | | | 1103-1284 |
| | | | | | 1397-1478 |
| | | | | | 1831-2026 |
| | | | | | 2418-3008 |
| HCROA43 | 72 | 948286 | AC074373 | 299 | 1-303 |
| HCRNR03 | 73 | 922819 | AL139181 | 300 | 1-43 |
| | | | | | 946-1000 |
| | | | | | 1203-1650 |
| | | | | | 2360-2851 |
| HCRNR03 | 73 | 922819 | AL138695 | 301 | 1-43 |
| | | | | | 946-1000 |
| | | | | | 1203-1650 |
| | | | | | 2360-2815 |
| HCRNR03 | 73 | 922819 | AL139185 | 302 | 1-43 |
| | | | | | 946-1000 |
| | | | | | 1203-1650 |
| | | | | | 2360-2851 |
| HCRNR03 | 73 | 922819 | AL139185 | 303 | 1-618 |
| HCRNR03 | 73 | 922819 | AL139181 | 304 | 1-618 |
| HCRMX10 | 75 | 963663 | AC009093 | 305 | 1-372 |
| | | | | | 720-1405 |
| HCRMX10 | 75 | 963663 | AC009130 | 306 | 1-372 |
| | | | | | 720-1405 |
| HCRMX10 | 75 | 963663 | AC007615 | 307 | 1-372 |
| | | | | | 720-1405 |
| HCRMX10 | 75 | 963663 | AC009093 | 308 | 1-1003 |
| HCRMX10 | 75 | 963663 | AC007615 | 309 | 1-1003 |
| HCQDA13 | 78 | 908299 | AP001574 | 310 | 1-391 |
| | | | | | 399-934 |
| | | | | | 989-1474 |
| | | | | | 1539-1808 |
| | | | | | 1878-2473 |
| | | | | | 2611-3878 |
| | | | | | 4484-4887 |
| | | | | | 5018-5164 |
| | | | | | 6084-6248 |
| | | | | | 6329-7340 |
| | | | | | 7770-8529 |
| | | | | | 10244-10365 |
| | | | | | 10679-10999 |
| | | | | | 11721-11928 |
| | | | | | 12212-12605 |
| | | | | | 12918-13928 |
| HCQDA13 | 78 | 908299 | AC013608 | 311 | 1-1010 |
| | | | | | 1069-1262 |
| | | | | | 1990-2258 |
| | | | | | 2842-5055 |
| HCQDA13 | 78 | 908299 | AF235095 | 312 | 1-151 |
| | | | | | 465-782 |
| | | | | | 1507-1714 |
| | | | | | 1998-2391 |
| | | | | | 2704-3714 |
| | | | | | 3773-3952 |
| | | | | | 4694-4962 |
| | | | | | 5546-6784 |
| HCQDA13 | 78 | 908299 | AC013608 | 313 | 1-377 |
| HCQDA13 | 78 | 908299 | AF235095 | 314 | 1-760 |
| HCQDA13 | 78 | 908299 | AP001574 | 315 | 1-422 |
| HCQDA13 | 78 | 908299 | AC013608 | 316 | 1-394 |
| HCQCQ76 | 79 | 953491 | AC027326 | 317 | 1-1321 |
| | | | | | 1363-2417 |
| HCQCQ76 | 79 | 953491 | AC010622 | 318 | 1-1315 |
| | | | | | 1357-1981 |
| HCQCQ76 | 79 | 953491 | AC027326 | 319 | 1-225 |
| HCQCQ76 | 79 | 953491 | AC010622 | 320 | 1-3115 |
| HCQAC71 | 80 | 951844 | AC018845 | 321 | 1-111 |
| | | | | | 281-657 |
| | | | | | 1134-1623 |
| | | | | | 1791-1965 |
| | | | | | 3712-4015 |
| | | | | | 6018-6383 |
| | | | | | 7498-7672 |
| | | | | | 9645-9802 |
| | | | | | 9952-10439 |
| | | | | | 12178-12300 |
| | | | | | 13340-13871 |
| | | | | | 14159-14747 |
| | | | | | 14949-16552 |
| HCQAC71 | 80 | 951844 | AC007338 | 322 | 1-111 |
| | | | | | 281-657 |
| | | | | | 1134-1613 |
| | | | | | 1791-1965 |
| | | | | | 3712-4015 |
| | | | | | 6018-6383 |
| | | | | | 7498-7672 |
| | | | | | 9645-9802 |
| | | | | | 9952-10439 |
| | | | | | 12178-12300 |
| | | | | | 13340-13871 |
| | | | | | 14159-14747 |
| | | | | | 14949-16552 |
| HCQAC71 | 80 | 951844 | AC018845 | 323 | 1-150 |
| HCQAC71 | 80 | 951844 | AC007338 | 324 | 1-150 |
| HCLHE01 | 81 | 914341 | AC015936 | 325 | 1-867 |
| | | | | | 941-1038 |
| | | | | | 1445-2109 |
| HCLHE01 | 81 | 914341 | AC015936 | 326 | 1-2147 |
| H2LAM15 | 82 | 767606 | AC005971 | 327 | 1-384 |
| | | | | | 1607-2194 |
| | | | | | 2501-2679 |
| | | | | | 2714-3008 |
| | | | | | 3294-5645 |
| | | | | | 5706-5867 |
| | | | | | 7869-8294 |
| | | | | | 8698-8815 |
| | | | | | 9677-9738 |
| | | | | | 10469-10894 |
| | | | | | 16079-16366 |
| | | | | | 18971-19267 |
| | | | | | 19303-19634 |
| | | | | | 22325-22853 |
| | | | | | 23664-23983 |
| | | | | | 24003-24401 |
| | | | | | 24470-24690 |
| | | | | | 25545-26062 |
| | | | | | 26253-27613 |
| | | | | | 29664-29801 |
| | | | | | 35223-36709 |
| H2LAM15 | 82 | 767606 | AL356460 | 328 | 1-296 |
| | | | | | 1519-2272 |
| | | | | | 2413-2591 |
| | | | | | 2626-2920 |
| | | | | | 3206-5559 |
| | | | | | 5620-5781 |
| | | | | | 7784-8208 |
| | | | | | 8613-8730 |
| | | | | | 9592-9653 |
| | | | | | 10384-10809 |
| | | | | | 13353-13493 |
| | | | | | 16165-16265 |
| | | | | | 18887-19122 |
| | | | | | 19219-19549 |
| | | | | | 22239-22666 |
| | | | | | 22710-23025 |
| | | | | | 23112-23564 |
| | | | | | 23898-24217 |
| | | | | | 24237-24635 |
| | | | | | 24704-24924 |
| | | | | | 25767-26284 |
| | | | | | 26475-27836 |
| | | | | | 30276-30380 |
| | | | | | 33861-34003 |
| | | | | | 35218-35346 |
| | | | | | 35446-36933 |
| H2LAM15 | 82 | 767606 | AC005971 | 329 | 1-89 |
| H2LAM15 | 82 | 767606 | AL356460 | 330 | 1-383 |
| H2CBP41 | 83 | 923006 | AC027116 | 331 | 1-417 |
| | | | | | 1542-1883 |
| | | | | | 2547-2644 |
| | | | | | 3234-3317 |
| | | | | | 4045-4387 |
| | | | | | 4561-4942 |
| | | | | | 5029-5287 |
| | | | | | 6230-6850 |
| | | | | | 6936-7598 |
| | | | | | 7713-8015 |
| | | | | | 8248-8896 |
| H2CBP41 | 83 | 923006 | AC021329 | 332 | 1-417 |
| | | | | | 1542-1883 |
| | | | | | 2547-2644 |
| | | | | | 3234-3317 |
| | | | | | 4045-4387 |
| | | | | | 4561-4942 |
| | | | | | 5029-5287 |
| | | | | | 6230-6850 |
| | | | | | 6936-7597 |
| | | | | | 7712-8014 |
| | | | | | 8247-8895 |
| H2CBP41 | 83 | 923006 | AC027116 | 333 | 1-5853 |
| | | | | | 5877-7569 |
| H2CBP41 | 83 | 923006 | AC021329 | 334 | 1-5853 |
| | | | | | 5877-7569 |

[0046] Table 1B summarizes additional polynucleotides encompassed by the invention (including cDNA clones related to the sequences (Clone ID NO:Z), contig sequences (contig identifier (Contig ID:) contig nucleotide sequence identifiers (SEQ ID NO:X)), and genomic sequences (SEQ ID NO:B). The first column provides a unique clone identifier, “Clone ID NO:Z”, for a cDNA clone related to each contig sequence. The second column provides the sequence identifier, “SEQ ID NO:X”, for each contig sequence. The third column provides a unique contig identifier, “Contig ID:” for each contig sequence. The fourth column, provides a BAC identifier “BAC ID NO:A” for the BAC clone referenced in the corresponding row of the table. The fifth column provides the nucleotide sequence identifier, “SEQ ID NO:B” for a fragment of the BAC clone identified in column four of the corresponding row of the table. The sixth column, “Exon From-To”, provides the location (i.e., nucleotide position numbers) within the polynucleotide sequence of SEQ ID NO:B which delineate certain polynucleotides of the invention that are also exemplary members of polynucleotide sequences that encode polypeptides of the invention (e.g., polypeptides containing amino acid sequences encoded by the polynucleotide sequences delineated in column six, and fragments and variants thereof).

TABLE 2

| | | SEQ | | | | Score/ | | |
|---|---|---|---|---|---|---|---|---|
| Clone ID | Contig | ID | Analysis | | PFam/NR Accession | Percent | NT | |
| NO: Z | ID: | NO: X | Method | PFam/NR Description | Number | Identity | From | NT To |
| HCRMT41 | 974324 | 17 | blastx.2 | similar to Na+/H+ | emb\|CAB14288.1\| | 28% | 133 | 486 |
| | | | | antiporter [Bacillus | | | | |
| | | | | subtilis] | | | | |
| HCRQG35 | 954968 | 28 | blastx.2 | unnamed protein product | emb\|CAB69195.1\| | 81% | 11 | 91 |
| | | | | [unidentified] | | | | |
| HWLNX76 | 887583 | 30 | blastx.2 | (AF126484) CARD4 | gb\|AAD29125.1\|AF1 | 73% | 3 | 371 |
| | | | | [Homo sapiens] | 26484_1 | 93% | 301 | 393 |
| | | | | | | 35% | 3 | 278 |
| | | | | | | 31% | 3 | 281 |
| | | | | | | 33% | 3 | 260 |
| | | | | | | 32% | 6 | 272 |
| | | | | | | 81% | 269 | 301 |
| HWNCY59 | 927487 | 40 | blastx.2 | (AF090942) PRO0657 | gb\|AAF24054.1\|AF0 | 80% | 210 | 133 |
| | | | | [Homo sapiens] | 90942_1 | 66% | 238 | 203 |
| HWNGN09 | 961602 | 44 | HMMER | PFAM: Ribosomal | PF00338 | 52.21 | 82 | 246 |
| | | | 1.8 | protein S10 | | | | |
| | | | blastx.2 | (AL132880) predicted | emb\|CAB60869.1\| | 57% | 73 | 246 |
| | | | | using Genefinder; | | 75% | 29 | 85 |
| | | | | preliminary prediction 1 | | | | |
| HWNCN05 | 928791 | 48 | blastx.2 | (AF140675) zinc | gb\|AAD56358.1\|AF1 | 39% | 185 | 721 |
| | | | | metalloprotease | 40675_1 | | | |
| | | | | ADAMTS7 [Homo | | | | |
| | | | | sapiens] | | | | |
| HWNAL06 | 933591 | 51 | blastx.2 | putative ribosomal | emb\|CAA37793.1\| | 73% | 308 | 421 |
| | | | | protein (AA 1-184) | | | | |
| | | | | [Homo sapiens] | | | | |
| HWLOB68 | 908500 | 62 | HMMER | PFAM:KRAB box | PF01352 | 125.8 | 87 | 254 |
| | | | 2.1.1 | | | | | |
| | | | blastx.2 | (AJ245586) KRAB | emb\|CAB52478.1\| | 100% | 93 | 281 |
| | | | | protein domain [Homo | | | | |
| | | | | sapiens] | | | | |
| HWLNA36 | 974863 | 64 | blastx.2 | (AF106037) adipocyte- | gb\|AAF07395.1\|AF1 | 96% | 586 | 317 |
| | | | | derived leucine | 06037_1 | 88% | 650 | 576 |
| | | | | aminopeptidase [Homo | | | | |
| | | | | sapiens] | | | | |
| HCYBO59 | 520114 | 67 | blastx.2 | (AF006514) CHD2 | gb\|AAB87382.1\| | 65% | 101 | 361 |
| | | | | [Homo sapiens] | | 69% | 349 | 387 |
| HCROA43 | 948286 | 72 | HMMER | PFAM: von Willebrand | PF00093 | 83.7 | 181 | 351 |
| | | | 2.1.1 | factor type C domain | | | | |
| | | | blastx.2 | (AF168680) cysteine- | gb\|AAF34410.1\|AF1 | 34% | 37 | 405 |
| | | | | rich repeat-containing | 68680_1 | 32% | 28 | 357 |
| | | | | protein 1 | | 26% | 115 | 714 |
| | | | | | | 28% | 64 | 648 |
| | | | | | | 36% | 7 | 189 |
| HCRND06 | 934631 | 74 | blastx.2 | ZZ:beta-Gal′ IgG-binding | gb\|AAB00807.1\| | 73% | 477 | 599 |
| | | | | fusion protein | | | | |
| | | | | [unidentified cloning 1 | | | | |
| HCQDE22 | 949991 | 77 | blastx.2 | (AF072816) ABC-type | gb\|AAC25416.1\| | 48% | 401 | 694 |
| | | | | transporter MRP3 [Rattus | | 36% | 221 | 403 |
| | | | | norvegicus] | | 70% | 685 | 744 |
| | | | | | | 29% | 88 | 249 |

[0047] Table 2 further characterizes certain encoded polypeptides of the invention, by providing the results of comparisons to protein and protein family databases. The first column provides a unique clone identifier, “Clone ID NO:”, corresponding to a cDNA clone disclosed in Table 1A. The second column provides the unique contig indentifier, “Contig ID:” which allows correlation with the information in Table 1A. The third column provides the sequence identifier, “SEQ ID NO:X”, for the contig polynucleotide sequences. The fourth column provides the analysis method by which the homology/identity disclosed in the row was determined. The fifth column provides a description of PFam/NR hits having significant matches identified by each analysis. Column six provides the accession number of the PFam/NR hit disclosed in the fifth column. Column seven, “Score/Percent Identity”, provides a quality score or the percent identity, of the hit disclosed in column five. Comparisons were made between polypeptides encoded by polynucleotides of the invention and a non-redundant protein database (herein referred to as “NR”), or a database of protein families (herein referred to as “PFam”), as described below.

[0048] The NR database, which comprises the NBRF PIR database, the NCBI GenPept database, and the SIB SwissProt and TrEMBL databases, was made non-redundant using the computer program nrdb2 (Warren Gish, Washington University in Saint Louis). Each of the polynucleotides shown in Table 1A, column 3 (e.g., SEQ ID NO:X or the ‘Query’ sequence) was used to search against the NR database. The computer program BLASTX was used to compare a 6-frame translation of the Query sequence to the NR database (for information about the BLASTX algorithm please see Altshul et al., J. Mol. Biol. 215:403-410 (1990), and Gish et al., Nat. Genet. 3:266-272 (1993)). A description of the sequence that is most similar to the Query sequence (the highest scoring ‘Subject’) is shown in column five of Table 2 and the database accession number for that sequence is provided in column six. The highest scoring ‘Subject’ is reported in Table 2 if (a) the estimated probability that the match occurred by chance alone is less than 1.0e-07, and (b) the match was not to a known repetitive element. BLASTX returns alignments of short polypeptide segments of the Query and Subject sequences which share a high degree of similarity; these segments are known as High-Scoring Segment Pairs or HSPs. Table 2 reports the degree of similarity between the Query and the Subject for each HSP as a percent identity in Column 7. The percent identity is determined by dividing the number of exact matches between the two aligned sequences in the HSP, dividing by the number of Query amino acids in the HSP and multiplying by 100. The polynucleotides of SEQ ID NO:X which encode the polypeptide sequence that generates an HSP are delineated by columns 8 and 9 of Table 2.

[0049] The PFam database, PFam version 5.2, (Sonnhammer et al., Nucl. Acids Res., 26:320-322, (1998)) consists of a series of multiple sequence alignments; one alignment for each protein family. Each multiple sequence alignment is converted into a probability model called a Hidden Markov Model, or HMM, that represents the position-specific variation among the sequences that make up the multiple sequence alignment (see, e.g., R. Durbin et al., Biological sequence analysis: probabilistic models of proteins and nucleic acids, Cambridge University Press, 1998 for the theory of HMMs). The program HMMER version 1.8 (Sean Eddy, Washington University in Saint Louis) was used to compare the predicted protein sequence for each Query sequence (SEQ ID NO:Y in Table 1A) to each of the HMMs derived from PFam version 5.2. A HMM derived from PFam version 5.2 was said to be a significant match to a polypeptide of the invention if the score returned by HMMER 1.8 was greater than 0.8 times the HMMER 1.8 score obtained with the most distantly related known member of that protein family. The description of the PFam family which shares a significant match with a polypeptide of the invention is listed in column 5 of Table 2, and the database accession number of the PFam hit is provided in column 6. Column 7 provides the score returned by HMMER version 1.8 for the alignment. Columns 8 and 9 delineate the polynucleotides of SEQ ID NO:X which encode the polypeptide sequence which shows a significant match to a PFam protein family.

[0050] As mentioned, columns 8 and 9 in Table 2, “NT From” and “NT To”, delineate the polynucleotides of “SEQ ID NO:X” that encode a polypeptide having a significant match to the PFam/NR database as disclosed in the fifth column of Table 2. In one embodiment, the invention provides a protein comprising, or alternatively consisting of, a polypeptide encoded by the polynucleotides of SEQ ID NO:X delineated in columns 8 and 9 of Table 2. Also provided are polynucleotides encoding such proteins, and the complementary strand thereto. 10481 The nucleotide sequence SEQ ID NO:X and the translated SEQ ID NO:Y are sufficiently accurate and otherwise suitable for a variety of uses well known in the art and described further below. For instance, the nucleotide sequences of SEQ ID NO:X are useful for designing nucleic acid hybridization probes that will detect nucleic acid sequences contained in SEQ ID NO:X or the cDNA contained in Clone ID NO:Z. These probes will also hybridize to nucleic acid molecules in biological samples, thereby enabling immediate applications in chromosome mapping, linkage analysis, tissue identification and/or typing, and a variety of forensic and diagnostic methods of the invention. Similarly, polypeptides identified from SEQ ID NO:Y may be used to generate antibodies which bind specifically to these polypeptides, or fragments thereof, and/or to the polypeptides encoded by the cDNA clones identified in, for example, Table 1A.

[0051] Nevertheless, DNA sequences generated by sequencing reactions can contain sequencing errors. The errors exist as misidentified nucleotides, or as insertions or deletions of nucleotides in the generated DNA sequence. The erroneously inserted or deleted nucleotides cause frame shifts in the reading frames of the predicted amino acid sequence. In these cases, the predicted amino acid sequence diverges from the actual amino acid sequence, even though the generated DNA sequence may be greater than 99.9% identical to the actual DNA sequence (for example, one base insertion or deletion in an open reading frame of over 1000 bases).

[0052] Accordingly, for those applications requiring precision in the nucleotide sequence or the amino acid sequence, the present invention provides not only the generated nucleotide sequence identified as SEQ ID NO:X, and a predicted translated amino acid sequence identified as SEQ ID NO:Y, but also a sample of plasmid DNA containing cDNA Clone ID NO:Z (deposited with the ATCC on Oct. 5, 2000, and receiving ATCC designation numbers PTA 2574 and PTA 2575; deposited with the ATCC on Jan. 5, 2001, having the depositor reference numbers TS-1, TS-2, AC-1, and AC-2; and/or as set forth, for example, in Table 1A, 6 and 7). The nucleotide sequence of each deposited clone can readily be determined by sequencing the deposited clone in accordance with known methods. Further, techniques known in the art can be used to verify the nucleotide sequences of SEQ ID NO:X.

[0053] The predicted amino acid sequence can then be verified from such deposits. Moreover, the amino acid sequence of the protein encoded by a particular clone can also be directly determined by peptide sequencing or by expressing the protein in a suitable host cell containing the deposited human cDNA, collecting the protein, and determining its sequence.

[0054] RACE Protocol for Recovery of Full-length Genes

[0055] Partial cDNA clones can be made full-length by utilizing the rapid amplification of cDNA ends (RACE) procedure described in Frohman, M. A., et al., Proc. Nat'l. Acad. Sci. USA, 85:8998-9002 (1988). A cDNA clone missing either the 5′ or 3′ end can be reconstructed to include the absent base pairs extending to the translational start or stop codon, respectively. In some cases, cDNAs are missing the start codon of translation. The following briefly describes a modification of this original 5′ RACE procedure. Poly A+ or total RNA is reverse transcribed with Superscript II (Gibco/BRL) and an antisense or complementary primer specific to the cDNA sequence. The primer is removed from the reaction with a Microcon Concentrator (Amicon). The first-strand cDNA is then tailed with dATP and terminal deoxynucleotide transferase (Gibco/BRL). Thus, an anchor sequence is produced which is needed for PCR amplification. The second strand is synthesized from the dA-tail in PCR buffer, Taq DNA polymerase (Perkin-Elmer Cetus), an oligo-dT primer containing three adjacent restriction sites (XhoI, SalI and ClaI) at the 5′ end and a primer containing just these restriction sites. This double-stranded cDNA is PCR amplified for 40 cycles with the same primers as well as a nested cDNA-specific antisense primer. The PCR products are size-separated on an ethidium bromide-agarose gel and the region of gel containing cDNA products the predicted size of missing protein-coding DNA is removed. cDNA is purified from the agarose with the Magic PCR Prep kit (Promega), restriction digested with XhoI or SalI, and ligated to a plasmid such as pBluescript SKII (Stratagene) at XhoI and EcoRV sites. This DNA is transformed into bacteria and the plasmid clones sequenced to identify the correct protein-coding inserts. Correct 5′ ends are confirmed by comparing this sequence with the putatively identified homologue and overlap with the partial cDNA clone. Similar methods known in the art and/or commercial kits are used to amplify and recover 3′ ends.

[0056] Several quality-controlled kits are commercially available for purchase. Similar reagents and methods to those above are supplied in kit form from Gibco/BRL for both 5′ and 3′ RACE for recovery of full length genes. A second kit is available from Clontech which is a modification of a related technique, SLIC (single-stranded ligation to single-stranded cDNA), developed by Dumas et al., Nucleic Acids Res., 19:5227-32 (1991). The major differences in procedure are that the RNA is alkaline hydrolyzed after reverse transcription and RNA ligase is used to join a restriction site-containing anchor primer to the first-strand cDNA. This obviates the necessity for the IA-tailing reaction which results in a polyT stretch that is difficult to sequence past.

[0057] An alternative to generating 5′ or 3′ cDNA from RNA is to use cDNA library double-stranded DNA. An asymmetric PCR-amplified antisense cDNA strand is synthesized with an antisense cDNA-specific primer and a plasmid-anchored primer. These primers are removed and a symmetric PCR reaction is performed with a nested cDNA-specific antisense primer and the plasmid-anchored primer.

[0058] RNA Ligase Protocol for Generating the 5′ or 3′ End Sequences to Obtain Full Length Genes

[0059] Once a gene of interest is identified, several methods are available for the identification of the 5′ or 3′ portions of the gene which may not be present in the original cDNA plasmid. These methods include, but are not limited to, filter probing, clone enrichment using specific probes and protocols similar and identical to 5′ and 3′ RACE. While the full length gene may be present in the library and can be identified by probing, a useful method for generating the 5′ or 3′ end is to use the existing sequence information from the original cDNA to generate the missing information. A method similar to 5′ RACE is available for generating the missing 5′ end of a desired full-length gene. (This method was published by Fromont-Racine et al., Nucleic Acids Res., 21(7):1683-1684 (1993)). Briefly, a specific RNA oligonucleotide is ligated to the 5′ ends of a population of RNA presumably containing full-length gene RNA transcript. A primer set containing a primer specific to the ligated RNA oligonucleotide and a primer specific to a known sequence of the gene of interest, is used to PCR amplify the 5′ portion of the desired full length gene which may then be sequenced and used to generate the full length gene. This method starts with total RNA isolated from the desired source, poly A RNA may be used but is not a prerequisite for this procedure. The RNA preparation may then be treated with phosphatase if necessary to eliminate 5′ phosphate groups on degraded or damaged RNA, which may interfere with the later RNA ligase step. The phosphatase, if used, is then inactivated and the RNA is treated with tobacco acid pyrophosphatase in order to remove the cap structure present at the 5′ ends of messenger RNAs. This reaction leaves a 5′ phosphate group at the 5′ end of the cap cleaved RNA which can then be ligated to an RNA oligonucleotide using T4 RNA ligase. This modified RNA preparation can then be used as a template for first strand cDNA synthesis using a gene specific oligonucleotide. The first strand synthesis reaction can then be used as a template for PCR amplification of the desired 5′ end using a primer specific to the ligated RNA oligonucleotide and a primer specific to the known sequence of the colorectal cancer antigen of interest. The resultant product is then sequenced and analyzed to confirm that the 5′ end sequence belongs to the relevant colorectal cancer antigen.

[0060] The present invention also relates to vectors or plasmids, which include such DNA sequences, as well as the use of the DNA sequences. The material deposited with the ATCC (deposited with the ATCC on Oct. 5, 2000, and receiving ATCC designation numbers PTA 2574 and PTA 2575; deposited with the ATCC on Jan. 5, 2001, having the depositor reference numbers TS-1, TS-2, AC-1, and AC-2; and/or as set forth, for example, in Table 1A, 6 and 7) is a mixture of cDNA clones derived from a variety of human tissue and cloned in either a plasmid vector or a phage vector, as shown, for example, in Table 7. These deposits are referred to as “the deposits” herein. The tissues from which some of the clones were derived are listed in Table 7, and the vector in which the corresponding cDNA is contained is also indicated in Table 7. The deposited material includes cDNA clones corresponding to SEQ ID NO:X described, for example, in Table 1A (Clone ID NO:Z). A clone which is isolatable from the ATCC Deposits by use of a sequence listed as SEQ ID NO:X, may include the entire coding region of a human gene or in other cases such clone may include a substantial portion of the coding region of a human gene Furthermore, although the sequence listing may in some instances list only a portion of the DNA sequence in a clone included in the ATCC Deposits, it is well within the ability of one skilled in the art to sequence the DNA included in a clone contained in the ATCC Deposits by use of a sequence (or portion thereof) described in, for example Tables 1A or 2 by procedures hereinafter further described, and others apparent to those skilled in the art.

[0061] Also provided in Table 7 is the name of the vector which contains the cDNA clone. Each vector is routinely used in the art. The following additional information is provided for convenience.

[0062] Vectors Lambda Zap (U.S. Pat. Nos. 5,128,256 and 5,286,636), Uni-Zap XR (U.S. Pat. Nos. 5,128,256 and 5,286,636), Zap Express (U.S. Pat. Nos. 5,128,256 and 5,286,636), pBluescript (pBS) (Short, J. M. et al., Nucleic Acids Res. 16:7583-7600 (1988); Alting-Mees, M. A. and Short, J. M., Nucleic Acids Res. 17:9494 (1989)) and pBK (Alting-Mees, M. A. et al., Strategies 5.58-61 (1992)) are commercially available from Stratagene Cloning Systems, Inc., 11011 N. Torrey Pines Road, La Jolla, Calif., 92037. pBS contains an ampicillin resistance gene and pBK contains a neomycin resistance gene. Phagemid pBS may be excised from the Lambda Zap and Uni-Zap XR vectors, and phagemid pBK may be excised from the Zap Express vector. Both phagemids may be transformed into E. coli strain XL-1 Blue, also available from Stratagene.

[0063] Vectors pSport1, pCMVSport 1.0, pCMVSport 2.0 and pCMVSport 3.0, were obtained from Life Technologies, Inc., P. O. Box 6009, Gaithersburg, Md. 20897. All Sport vectors contain an ampicillin resistance gene and may be transformed into E. coli strain DH10B, also available from Life Technologies. See, for instance, Gruber, C. E., et al., Focus 15:59-(1993). Vector lafmid BA (Bento Soares, Columbia University, New York, N.Y.) contains an ampicillin resistance gene and can be transformed into E. coli strain XL-1 Blue. Vector pCR®2.1, which is available from Invitrogen, 1600 Faraday Avenue, Carlsbad, Calif. 92008, contains an ampicillin resistance gene and may be transformed into E. coli strain DH10B, available from Life Technologies. See, for instance, Clark, J. M., Nuc. Acids Res. 16:9677-9686 (1988) and Mead, D. et al., Bio/Technology 9: (1991).

[0064] The present invention also relates to the genes corresponding to SEQ ID NO:X, SEQ ID NO:Y, and/or the deposited clone (Clone ID NO:Z). The corresponding gene can be isolated in accordance with known methods using the sequence information disclosed herein. Such methods include preparing probes or primers from the disclosed sequence and identifying or amplifying the corresponding gene from appropriate sources of genomic material.

[0065] Also provided in the present invention are allelic variants, orthologs, and/or species homologs. Procedures known in the art can be used to obtain full-length genes, allelic variants, splice variants, full-length coding portions, orthologs, and/or species homologs of colorectal cancer associated genes corresponding to SEQ ID NO:X or the complement thereof, polypeptides encoded by SEQ ID NO:X or the complement thereof, and/or the cDNA contained in Clone ID NO:Z, using information from the sequences disclosed herein or the clones deposited with the ATCC. For example, allelic variants and/or species homologs may be isolated and identified by making suitable probes or primers from the sequences provided herein and screening a suitable nucleic acid source for allelic variants and/or the desired homologue.

[0066] The polypeptides of the invention can be prepared in any suitable manner. Such polypeptides include isolated naturally occurring polypeptides, recombinantly produced polypeptides, synthetically produced polypeptides, or polypeptides produced by a combination of these methods. Means for preparing such polypeptides are well understood in the art.

[0067] The polypeptides may be in the form of the secreted protein, including the mature form, or may be a part of a larger protein, such as a fusion protein (see below). It is often advantageous to include an additional amino acid sequence which contains secretory or leader sequences, pro-sequences, sequences which aid in purification, such as multiple histidine residues, or an additional sequence for stability during recombinant production.

[0068] The polypeptides of the present invention are preferably provided in an isolated form, and preferably are substantially purified. A recombinantly produced version of a polypeptide, including the secreted polypeptide, can be substantially purified using techniques described herein or otherwise known in the art, such as, for example, by the one-step method described in Smith and Johnson, Gene 67:31-40 (1988). Polypeptides of the invention also can be purified from natural, synthetic or recombinant sources using techniques described herein or otherwise known in the art, such as, for example, antibodies of the invention raised against the colorectal cancer polypeptides of the present invention in methods which are well known in the art.

[0069] The present invention provides a polynucleotide comprising, or alternatively consisting of, the nucleic acid sequence of SEQ ID NO:X, and/or the cDNA sequence contained in Clone ID NO:Z. The present invention also provides a polypeptide comprising, or alternatively, consisting of, the polypeptide sequence of SEQ ID NO:Y, a polypeptide encoded by SEQ ID NO:X or a complement thereof, a polypeptide encoded by the cDNA contained in Clone ID NO:Z, and/or the polypeptide sequence encoded by a nucleotide sequence in SEQ ID NO:B as defined in column 6 of Table 1B. Polynucleotides encoding a polypeptide comprising, or alternatively consisting of the polypeptide sequence of SEQ ID NO:Y, a polypeptide encoded by SEQ ID NO:X, a polypeptide encoded by the cDNA contained in Clone ID NO:Z and/or a polypeptide sequence encoded by a nucleotide sequence in SEQ ID NO:B as defined in column 6 of Table 1B are also encompassed by the invention. The present invention further encompasses a polynucleotide comprising, or alternatively consisting of, the complement of the nucleic acid sequence of SEQ ID NO:X, a nucleic acid sequence encoding a polypeptide encoded by the complement of the nucleic acid sequence of SEQ ID NO:X, and/or the cDNA contained in Clone ID NO:Z.

[0070] Moreover, representative examples of polynucleotides of the invention comprise, or alternatively consist of, one, two, three, four, five, six, seven, eight, nine, ten, or more of the sequences delineated in Table 1B column 6, or any combination thereof. Additional, representative examples of polynucleotides of the invention comprise, or alternatively consist of, one, two, three, four, five, six, seven, eight, nine, ten, or more of the complementary strand(s) of the sequences delineated in Table 1B column 6, or any combination thereof. In further embodiments, the above-described polynucleotides of the invention comprise, or alternatively consist of, sequences delineated in Table 1B, column 6, and have a nucleic acid sequence which is different from that of the BAC fragment having the sequence disclosed in SEQ ID NO:B (see Table 1B, column 5). In additional embodiments, the above-described polynucleotides of the invention comprise, or alternatively consist of, sequences delineated in Table 1B, column 6, and have a nucleic acid sequence which is different from that published for the BAC clone identified as BAC ID NO:A (see Table 1B, column 4). In additional embodiments, the above-described polynucleotides of the invention comprise, or alternatively consist of, sequences delineated in Table 1B, column 6, and have a nucleic acid sequence which is different from that contained in the BAC clone identified as BAC ID NO:A (see Table 1B, column 4). Polypeptides encoded by these polynucleotides, other polynucleotides that encode these polypeptides, and antibodies that bind these polypeptides are also encompassed by the invention. Additionally, fragments and variants of the above-described polynucleotides and polypeptides are also encompassed by the invention.

[0071] Further, representative examples of polynucleotides of the invention comprise, or alternatively consist of, one, two, three, four, five, six, seven, eight, nine, ten, or more of the sequences delineated in column 6 of Table 1B which correspond to the same Clone ID NO:Z (see Table 1B, column 1), or any combination thereof. Additional, representative examples of polynucleotides of the invention comprise, or alternatively consist of, one, two, three, four, five, six, seven, eight, nine, ten, or more of the complementary strand(s) of the sequences delineated in column 6 of Table 1B which correspond to the same Clone ID NO:Z (see Table 1B, column 1), or any combination thereof. In further embodiments, the above-described polynucleotides of the invention comprise, or alternatively consist of, sequences delineated in column 6 of Table 1B which correspond to the same Clone ID NO:Z (see Table 1B, column 1) and have a nucleic acid sequence which is different from that of the BAC fragment having the sequence disclosed in SEQ ID NO:B (see Table 1B, column 5). In additional embodiments, the above-described polynucleotides of the invention comprise, or alternatively consist of, sequences delineated in column 6 of Table 1B which correspond to the same Clone ID NO:Z (see Table 1B, column 1) and have a nucleic acid sequence which is different from that published for the BAC clone identified as BAC ID NO:A (see Table 1B, column 4). In additional embodiments, the above-described polynucleotides of the invention comprise, or alternatively consist of, sequences delineated in column 6 of Table 1 B which correspond to the same Clone ID NO:Z (see Table 1B, column 1) and have a nucleic acid sequence which is different from that contained in the BAC clone identified as BAC ID NO:A (see Table 1B, column 4). Polypeptides encoded by these polynucleotides, other polynucleotides that encode these polypeptides, and antibodies that bind these polypeptides are also encompassed by the invention. Additionally, fragments and variants of the above-described polynucleotides and polypeptides are also encompassed by the invention.

[0072] Further, representative examples of polynucleotides of the invention comprise, or alternatively consist of, one, two, three, four, five, six, seven, eight, nine, ten, or more of the sequences delineated in column 6 of Table 1B which correspond to the same contig sequence identifer SEQ ID NO:X (see Table 1B, column 2), or any combination thereof. Additional, representative examples of polynucleotides of the invention comprise, or alternatively consist of, one, two, three, four, five, six, seven, eight, nine, ten, or more of the complementary strand(s) of the sequences delineated in column 6 of Table 1B which correspond to the same contig sequence identifer SEQ ID NO:X (see Table 1B, column 2), or any combination thereof. In further embodiments, the above-described polynucleotides of the invention comprise, or alternatively consist of, sequences delineated in column 6 of Table 1B which correspond to the same contig sequence identifer SEQ ID NO:X (see Table 1B, column 2) and have a nucleic acid sequence which is different from that of the BAC fragment having the sequence disclosed in SEQ ID NO:B (see Table 1B, column 5). In additional embodiments, the above-described polynucleotides of the invention comprise, or alternatively consist of, sequences delineated in column 6 of Table 1B which correspond to the same contig sequence identifer SEQ ID NO:X (see Table 1B, column 2) and have a nucleic acid sequence which is different from that published for the BAC clone identified as BAC ID NO:A (see Table 1B, column 4). In additional embodiments, the above-described polynucleotides of the invention comprise, or alternatively consist of, sequences delineated in column 6 of Table 1B which correspond to the same contig sequence identifer SEQ ID NO:X (see Table 1B, column 2) and have a nucleic acid sequence which is different from that contained in the BAC clone identified as BAC ID NO:A (See Table 1B, column 4). Polypeptides encoded by these polynucleotides, other polynucleotides that encode these polypeptides, and antibodies that bind these polypeptides are also encompassed by the invention. Additionally, fragments and variants of the above-described polynucleotides and polypeptides are also encompassed by the invention.

[0073] Moreover, representative examples of polynucleotides of the invention comprise, or alternatively consist of, one, two, three, four, five, six, seven, eight, nine, ten, or more of the sequences delineated in the same row of Table 1B column 6, or any combination thereof. Additional, representative examples of polynucleotides of the invention comprise, or alternatively consist of, one, two, three, four, five, six, seven, eight, nine, ten, or more of the complementary strand(s) of the sequences delineated in the same row of Table 1B column 6, or any combination thereof. In preferred embodiments, the polynucleotides of the invention comprise, or alternatively consist of, one, two, three, four, five, six, seven, eight, nine, ten, or more of the complementary strand(s) of the sequences delineated in the same row of Table 1B column 6, wherein sequentially delineated sequences in the table (i.e. corresponding to those exons located closest to each other) are directly contiguous in a 5′ to 3′ orientation. In further embodiments, above-described polynucleotides of the invention comprise, or alternatively consist of, sequences delineated in the same row of Table 1B, column 6, and have a nucleic acid sequence which is different from that of the BAC fragment having the sequence disclosed in SEQ ID NO:B (see Table 1B, column 5). In additional embodiments, the above-described polynucleotides of the invention comprise, or alternatively consist of, sequences delineated in the same row of Table 1B, column 6, and have a nucleic acid sequence which is different from that published for the BAC clone identified as BAC ID NO:A (see Table 1B, column 4). In additional embodiments, the above-described polynucleotides of the invention comprise, or alternatively consist of, sequences delineated in the same row of Table 1B, column 6, and have a nucleic acid sequence which is different from that contained in the BAC clone identified as BAC ID NO:A (see Table 1B, column 4). Polypeptides encoded by these polynucleotides, other polynucleotides that encode these polypeptides, and antibodies that bind these polypeptides are also encompassed by the invention.

[0074] In additional specific embodiments, polynucleotides of the invention comprise, or alternatively consist of, one, two, three, four, five, six, seven, eight, nine, ten, or more of the sequences delineated in column 6 of Table 1B, and the polynucleotide sequence of SEQ ID NO:X (e.g., as defined in Table 1B, column 2) or fragments or variants thereof. Polypeptides encoded by these polynucleotides, other polynucleotides that encode these polypeptides, and antibodies that bind these polypeptides are also encompassed by the invention.

[0075] In additonal specific embodiments, polynucleotides of the invention comprise, or alternatively consist of, one, two, three, four, five, six, seven, eight, nine, ten, or more of the sequences delineated in column 6 of Table 1B which correspond to the same Clone ID NO:Z (see Table 1B, column 1), and the polynucleotide sequence of SEQ ID NO:X (e.g., as defined in Table 1A or 1B) or fragments or variants thereof. In preferred embodiments, the delineated sequences and polynucleotide sequence of SEQ ID NO:X correspond to the same Clone ID NO:Z. Polypeptides encoded by these polynucleotides, other polynucleotides that encode these polypeptides, and antibodies that bind these polypeptides are also encompassed by the invention.

[0076] In further specific embodiments, polynucleotides of the invention comprise, or alternatively consist of, one, two, three, four, five, six, seven, eight, nine, ten, or more of the sequences delineated in the same row of column 6 of Table 1B, and the polynucleotide sequence of SEQ ID NO:X (e.g., as defined in Table 1A or 1B) or fragments or variants thereof. In preferred embodiments, the delineated sequences and polynucleotide sequence of SEQ ID NO:X correspond to the same row of column 6 of Table 1B. Polypeptides encoded by these polynucleotides, other polynucleotides that encode these polypeptides, and antibodies that bind these polypeptides are also encompassed by the invention.

[0077] In additional specific embodiments, polynucleotides of the invention comprise, or alternatively consist of a polynucleotide sequence in which the 3′ 10 polynucleotides of one of the sequences delineated in column 6 of Table 1B and the 5′ 10 polynucleotides of the sequence of SEQ ID NO:X are directly contiguous. Nucleic acids which hybridize to the complement of these 20 contiguous polynucleotides under stringent hybridization conditions or alternatively, under lower stringency conditions, are also encompassed by the invention. Polypeptides encoded by these polynucleotides and/or nucleic acids, other polynucleotides and/or nucleic acids that encode these polypeptides, and antibodies that bind these polypeptides are also encompassed by the invention. Additionally, fragments and variants of the above-described polynucleotides, nucleic acids, and polypeptides are also encompassed by the invention.

[0078] In additional specific embodiments, polynucleotides of the invention comprise, or alternatively consist of, a polynucleotide sequence in which the 3′ 10 polynucleotides of one of the sequences delineated in column 6 of Table 1B and the 5′ 10 polynucleotides of a fragment or variant of the sequence of SEQ ID NO:X are directly contiguous Nucleic acids which hybridize to the complement of these 20 contiguous polynucleotides under stringent hybridization conditions or alternatively, under lower stringency conditions, are also encompassed by the invention. Polypeptides encoded by these polynucleotides and/or nucleic acids, other polynucleotides and/or nucleic acids encoding these polypeptides, and antibodies that bind these polypeptides are also encompassed by the invention. Additionally, fragments and variants of the above-described polynucleotides, nucleic acids, and polypeptides are also encompassed by the invention.

[0079] In specific embodiments, polynucleotides of the invention comprise, or alternatively consist of, a polynucleotide sequence in which the 3′ 10 polynucleotides of the sequence of SEQ ID NO:X and the 5′ 10 polynucleotides of the sequence of one of the sequences delineated in column 6 of Table 1B are directly contiguous. Nucleic acids which hybridize to the complement of these 20 contiguous polynucleotides under stringent hybridization conditions or alternatively, under lower stringency conditions, are also encompassed by the invention. Polypeptides encoded by these polynucleotides and/or nucleic acids, other polynucleotides and/or nucleic acids encoding these polypeptides, and antibodies that bind these polypeptides are also encompassed by the invention. Additionally, fragments and variants of the above-described polynucleotides, nucleic acids, and polypeptides are also encompassed by the invention.

[0080] In specific embodiments, polynucleotides of the invention comprise, or alternatively consist of, a polynucleotide sequence in which the 3′ 10 polynucleotides of a fragment or variant of the sequence of SEQ ID NO:X and the 5′ 10 polynucleotides of the sequence of one of the sequences delineated in column 6 of Table 1B are directly contiguous. Nucleic acids which hybridize to the complement of these 20 contiguous polynucleotides under stringent hybridization conditions or alternatively, under lower stringency conditions, are also encompassed by the invention. Polypeptides encoded by these polynucleotides and/or nucleic acids, other polynucleotides and/or nucleic acids encoding these polypeptides, and antibodies that bind these polypeptides are also encompassed by the invention. Additionally, fragments and variants of the above-described polynucleotides, nucleic acids, and polypeptides, are also encompassed by the invention.

[0081] In further specific embodiments, polynucleotides of the invention comprise, or alternatively consist of, a polynucleotide sequence in which the 3′ 10 polynucleotides of one of the sequences delineated in column 6 of Table 1B and the 5′ 10 polynucleotides of another sequence in column 6 are directly contiguous. Nucleic acids which hybridize to the complement of these 20 contiguous polynucleotides under stringent hybridization conditions or alternatively, under lower stringency conditions, are also encompassed by the invention. Polypeptides encoded by these polynucleotides and/or nucleic acids, other polynucleotides and/or nucleic acids encoding these polypeptides, and antibodies that bind these polypeptides are also encompassed by the invention. Additionally, fragments and variants of the above-described polynucleotides, nucleic acids, and polypeptides are also encompassed by the invention.

[0082] In specific embodiments, polynucleotides of the invention comprise, or alternatively consist of, a polynucleotide sequence in which the 3′ 10 polynucleotides of one of the sequences delineated in column 6 of Table 1B and the 5′ 10 polynucleotides of another sequence in column 6 corresponding to the same Clone ID NO:Z (see Table 1B, column 1) are directly contiguous. Nucleic acids which hybridize to the complement of these 20 lower stringency conditions, are also encompassed by the invention. Polypeptides encoded by these polynucleotides and/or nucleic acids, other polynucleotides and/or nucleic acids encoding these polypeptides, and antibodies that bind these polypeptides are also encompassed by the invention. Additionally, fragments and variants of the above-described polynucleotides, nucleic acids, and polypeptides are also encompassed by the invention.

[0083] In specific embodiments, polynucleotides of the invention comprise, or alternatively consist of, a polynucleotide sequence in which the 3′ 10 polynucleotides of one sequence in column 6 corresponding to the same contig sequence identifer SEQ ID NO:X (see Table 1B, column 2) are directly contiguous. Nucleic acids which hybridize to the complement of these 20 contiguous polynucleotides under stringent hybridization conditions or alternatively, under lower stringency conditions, are also encompassed by the invention. Polypeptides encoded by these polynucleotides and/or nucleic acids, other polynucleotides and/or nucleic acids encoding these polypeptides, and antibodies that bind these polypeptides are also encompassed by the invention. Additionally, fragments and variants of the above-described polynucleotides, nucleic acids, and polypeptides are also encompassed by the invention.

[0084] In specific embodiments, polynucleotides of the invention comprise, or alternatively consist of a polynucleotide sequence in which the 3′ 10 polynucleotides of one of the sequences delineated in column 6 of Table 1B and the 5′ 10 polynucleotides of another sequence in column 6 corresponding to the same row are directly contiguous. In preferred embodiments, the 3′ 10 polynucleotides of one of the sequences delineated in column 6 of Table 1B is directly contiguous with the 5′ 10 polynucleotides of the next sequential exon delineated in Table 1B, column 6. Nucleic acids which hybridize to the complement of these 20 contiguous polynucleotides under stringent hybridization conditions or alternatively, under lower stringency conditions, are also encompassed by the invention. Polypeptides encoded by these polynucleotides and/or nucleic acids, other polynucleotides and/or nucleic acids encoding these polypeptides, and antibodies that bind these polypeptides are also encompassed by the invention. Additionally, fragments and variants of the above-described polynucleotides, nucleic acids, and polypeptides are also encompassed by the invention.

[0085] Many polynucleotide sequences, such as EST sequences, are publicly available and accessible through sequence databases and may have been publicly available prior to conception of the present invention. Preferably, such related polynucleotides are specifically excluded from the scope of the present invention. Accordingly, for each contig sequence (SEQ ID NO:X) listed in the third column of Table 1A, preferably excluded are one or more polynucleotides comprising a nucleotide sequence described by the general formula of a−b, where a is any integer between 1 and the final nucleotide minus 15 of SEQ ID NO:X, b is an integer of 15 to the final nucleotide of SEQ ID NO:X, where both a and b correspond to the positions of nucleotide residues shown in SEQ ID NO:X, and where b is greater than or equal to a+14. More specifically, preferably excluded are one or more polynucleotides comprising a nucleotide sequence described by the general formula of a−b, where a and b are integers as defined in columns 4 and 5, respectively, of Table 3. In specific embodiments, the polynucleotides of the invention do not consist of at least one, two, three, four, five, ten, or more of the specific polynucleotide sequences referenced by the Genbank Accession No. as disclosed in column 6 of Table 3 (including for example, published sequence in connection with a particular BAC clone). In further embodiments, preferably excluded from the invention are the specific polynucleotide sequence(s) contained in the clones corresponding to at least one, two, three, four, five, ten, or more of the available material having the accession numbers identified in the sixth column of this Table (including for example, the actual sequence contained in an identified BAC clone). In no way is this listing meant to encompass all of the sequences which may be excluded by the general formula, it is just a representative example. All references available through these accessions are hereby incorporated by reference in their entirety.

TABLE 3

| | SEQ | | | | |
|---|---|---|---|---|---|
| | ID | | | | |
| Clone ID | NO: | Contig | EST Disclaimer | | |
| NO: Z | X | ID: | Range of a | Range of b | Accession #'s |
| HCLHD88 | 11 | 929223 | 1-458 | 15-472 | AL109839. |
| HGCQR67 | 12 | 974592 | 1-662 | 15-676 | AI522172, AW026226, AC010997, and AC027393. |
| HCRMC26 | 13 | 913972 | 1-731 | 15-745 | AI609583, AA805672, AI076486, AW006108, AI708016, AA054347, |
| | | | | | AA063039, AA430074, AW294990, AA888790, AI014918, N57530, |
| | | | | | AI221602, AA579954, H91141, AA593129, AI828713, AW130274, |
| | | | | | AW162983, AI536783, AW163632, AW131695, AA541779, T99047, |
| | | | | | AW075255, R64176, AA687588, H63732, R77508, AA506597, AI927555, |
| | | | | | AA320359, AI818493, AA719412, AI688753, AW059671, R00556, H94447, |
| | | | | | C01999, AI280539, AW408192, H99403, F28513, AW009011, R50507, |
| | | | | | H63290, H94441, R64292, AW265154, R84822, AI918452, AA063074, |
| | | | | | R48566, H91189, H83676, W37374, AL036705, AL037454, AW151974, |
| | | | | | AW078729, AW151132, AI613314, AI564311, AL039132, AW080700, |
| | | | | | AI866469, AI370623, AI698987, AI801793, AW021662, AW020397, |
| | | | | | AI890907, AI473536, AI537274, AA715307, AA809974, AI581387, |
| | | | | | AI288305, AA641818, AI801325, AI691131, AI673278, AI623941, R41605, |
| | | | | | AI478123, AI696611, AI619426, AI916720, AL044192, AW148536, |
| | | | | | AI887785, AI582932, AW090087, AA748353, AW051088, AI633125, |
| | | | | | AI345010, AI698391, AI815232, AI538564, AI915291, AW152182, |
| | | | | | AI889189, AI811192, AW021717, AI927233, AA761557, AI884318, |
| | | | | | AI355779, W74529, AW166926, AI872423, AI114461, AW169234, |
| | | | | | AI687134, AW022636, AW157096, AI341690, AI909661, AI524677, |
| | | | | | AW084447, AI696398, AW198090, AI573060, AI114703, AI368943, |
| | | | | | AW089844, AI686565, AI536685, AI609236, AI866465, AI571439, |
| | | | | | AI678857, AA641578, AW169643, AI673363, ALI21463, AI686852, |
| | | | | | W38553, AI656962, AI359412, AI798114, AI499325, AL047187, |
| | | | | | AW104641, AI500714, AW051212, AI859991, AA505147, AI571442, |
| | | | | | AI345745, AI079226, AW087987, AI589428, AI923989, AI686576, |
| | | | | | AI086783, AI500113, AW160905, AW161098, AI860027, AI446704, |
| | | | | | AI923509, N33175, AA514684, AI491710, AW075382, AL121328, R32821, |
| | | | | | AI924051, AW058275, AI571966, AL040844, AI357672, AI570861, |
| | | | | | AI538850, AI765469, AI524179, AW193850, AI433500, AW243705, |
| | | | | | AI309244, AI538885, AI469516, AW079432, AW190297, AW163464, |
| | | | | | AL047854, AI567954, AW118496, AI370965, AW105601, AW074199, |
| | | | | | AA928539, AI521560, AL080011, N75779, AI678623, AI658566, AI002285, |
| | | | | | AI954183, AI624641, AI287233, AL047344, AW087866, AW238688, |
| | | | | | AI582413, AI286256, AI799313, AI540674, AI539800, AI860003, |
| | | | | | AL045620, AI627988, AI559619, AI401697, AI888575, AI273179, |
| | | | | | AA001397, AI686808, AAI15869, AW084797, AL045619, AA864839, |
| | | | | | AW169618, AI679095, AI580435, AL046473, AI285448, AW090550, |
| | | | | | AI567971, AW078735, AW161202, AI690480, AW059828, AI696340, |
| | | | | | AI250646, AW168121, AL121270, AI889191, AI269205, AI064830, |
| | | | | | AL049382, AL137548, D44497, S36676, AL137479, I48978, AR038854, |
| | | | | | A07588, AF104032, X83544, X65873, A18788, E12888, AF060866, |
| | | | | | AF090934, AF175903, AL049423, AF082526, 189947, A77033, A77035, |
| | | | | | AL133049, AL110171, Y10936, AF113699, AL096744, M85164, X60786, |
| | | | | | AR050959, S61953, AF141289, AL050172, U37359, X59812, AL137488, |
| | | | | | AF076464, Y16645, AL133558, AL137530, I52013, AL137459, AF183393, |
| | | | | | AF185614, AF177401, AC003686, AL122049, U61971, U61970, AL117585, |
| | | | | | AF090903, AL050092, L04504, AL137550, AF115410, AR022283, |
| | | | | | AF111112, AF067790, AL133084, S63521, Y11254, AR012379, X57796, |
| | | | | | D00174, AF112208, AL080148, AL117435, E08516, X60769, AL049283, |
| | | | | | I48979, I33392, A76335, Z72491, AF111849, A93914, AL050149, |
| | | | | | AL122101, Y08616, A21103, AF100931, AF017437, AF118070, AL117416, |
| | | | | | AF126488, AL137656, AL122093, A08910, AL133559, A08909, X66862, |
| | | | | | AF090943, AL110196, AL137258, AF079763, AF172400, Y14314, |
| | | | | | AL049426, AL133061, AL133067, AJ000937, AL080159, X70685, X72624, |
| | | | | | AL133057, AL080156, M80340, AR068466, AL078630, AC004200, |
| | | | | | AL137539, A08907, AF068615, AL096728, AF106657, AR034821, |
| | | | | | AF085809, U35846, AL133112, AR023871, A08913, X63410, AF031903, |
| | | | | | AL137523, I46765, AL133053, E12580, AL133015, A27171, S77771, |
| | | | | | AB029066, AR066486, AI8777, Y10655, A08908, AL137560, E16086, |
| | | | | | AL117583, AF131826, AL133075, AF090900, AL137533, AF061981, |
| | | | | | AL110228, A08912, AL137480, AB029065, AL110280, E06743, AL133637, |
| | | | | | AR054987, AF031147, A49139, Y07905, AF182215, D16301, E12747, |
| | | | | | X81464, Y18678, AL137271, U58996, AF159615, AJ238278, AL137529, |
| | | | | | U87620, AL133608, AL050155, AL133072, U49908, AL133623, Y13653, |
| | | | | | A26498, I89931, AF113694, A57389, AF126247, AL137557, I33391, |
| | | | | | AF080068, AF069506, U37312, AF150103, A03736, AF057300, AF057299, |
| | | | | | X83508, I68732, AP000083, AL133665, AL133560, I49625, AL122110, |
| | | | | | AL137526, AL122103, AL049339, E03671, AL133080, X80340, E02349, |
| | | | | | AF153205, AF044221, AL080234, A93350, E12579, U68387, U62966, |
| | | | | | AL110226, M64936, E02221, AF079765, AF043642, AJ005690, U88966, |
| | | | | | AL008706, S78214, I00734, A15345, AF000167, AL117648, AF119337, |
| | | | | | AB026995, A65341, AL050024, Z82022, AF176651, AL110197, AL122100, |
| | | | | | AF082324, I30339, I30334, AF026008, AL023657, E00617, E00717, |
| | | | | | AP002770, AP002770, AC019121, and AC019121. |
| HCRMJ47 | 14 | 919757 | 1-525 | 15-539 | AB027466, AR035961, and AR035966. |
| HCRMP18 | 15 | 888719 | 1-620 | 15-634 | AA853396, and AC005041. |
| HCRMR08 | 16 | 958489 | 1-520 | 15-534 | AC024554. |
| HCRMT41 | 17 | 974324 | 1-632 | 15-646 | AW392670, U46347, AL043003, AL043147, AL134132, AL042542, |
| | | | | | AW363220, AW384394, AL119457, AL134531, U46351, AL119324, |
| | | | | | U46350, and AL119396. |
| HCRIND67 | 18 | 921398 | 1-1998 | 15-2012 | AI978754, AA648498, AW001743, AI962419, AI446119, AI949312, |
| | | | | | N40531, AI522273, AA648907, W22178, AA773627, N46577, AI362932, |
| | | | | | AI214186, AA261979, AA252030, AW024768, AI935656, AW024010, |
| | | | | | AI416968, AI361764, AI039260, AA521447, AI127900, AI917267, |
| | | | | | AI761487, AA860961, AI936802, AI351462, AI580311, AI298481, |
| | | | | | AA931114, N26272, AI680734, AI864624, AW136987, W22807, AA808453, |
| | | | | | AA904280, N46583, AA131263, AA191430, H89921, AA326409, AI422420, |
| | | | | | AI189597, AI636058, AI680207, AA344413, AI767707, AA628794, |
| | | | | | AI312828, AW262532, AA860568, AA804488, N45139, AA574232, |
| | | | | | AI694810, T71336, AA251892, AI948498, AA364681, H91961, W22678, |
| | | | | | W22611, AA829581, T71491, H99173, N40538, and AC005325. |
| HCRNF63 | 19 | 916063 | 1-588 | 15-602 | AA424352, AW297467, AI873546, AI799462, AL356385, AL356385, |
| | | | | | AC016501, and AC016501. |
| HCRNI04 | 20 | 849408 | 1-523 | 15-537 | W96062, W96061, AC023257, and AC023257. |
| HCRNK95 | 21 | 890458 | 1-339 | 15-353 | AA081839, AA310355, AAI55876, H14728, Z45712, H18048, W67980, |
| | | | | | AA377062, H78474, H94833, AA359982, AA864236, F07871, N73165, |
| | | | | | N31384, H24503, AA504292, H25657, AA252782, F06229, AA309562, |
| | | | | | R52876, AI500636, and AL050265. |
| HCROM08 | 22 | 974135 | 1-330 | 15-344 | AL134524, AL119511, AL043152, AI431323, AL043168, AI432644, |
| | | | | | AI431307, AI431316, AL042853, AI431238, AI623302, AI866581, |
| | | | | | AI815239, AI432666, AI866786, AI567971, AI927233, AI440238, AI866465, |
| | | | | | AI494201, AW151974, AI500659, AI815232, AI801325, AI500523, |
| | | | | | AI538850, AI887775, AI582932, AI923989, AI590043, AI872423, AI284517, |
| | | | | | AI500706, AI445237, AI491776, AI289791, AW151138, AI889189, |
| | | | | | AI521560, AI500662, AI539800, AW172723, AI284509, AI582912, |
| | | | | | AI538885, AI440263, AI889168, AI866573, AI633493, AI434256, AI866469, |
| | | | | | AI805769, AI434242, AI888661, AI500714, AI284513, AI888118, AI285439, |
| | | | | | AI859991, AI436429, AI355779, AI889147, AI623736, AI581033, AI371228, |
| | | | | | AI491710, AI440252, AI860003, AI610557, AI431321, AI242736, AI828574, |
| | | | | | AI887499, AI539781, AI702065, AI539707, AI885949, AI285419, |
| | | | | | AW089557, AI559957, AI521571, AI537677, AI469775, AI804505, |
| | | | | | AI567953, AI815150, AI446495, AI866691, AI867068, AI952433, AI926593, |
| | | | | | AI285417, AI890907, AI432653, AI282249, AL042655, AI440260, |
| | | | | | AI955441, AI539260, AL042533, AW074057, AI225248, AI698352, |
| | | | | | AL043166, AI371229, AI358271, AL042787, AI432656, AL047611, |
| | | | | | AW151132, AI924051, AL042729, AW058275, AI888575, AI431315, |
| | | | | | AW081103, AL042515, AI539771, AI889191, AL042944, AI798359, |
| | | | | | AI888317, AL039390, AI282247, AL135012, AW151136, AI872315, |
| | | | | | AL042508, AI521465, AI561170, AI863197, AI690946, AL042931, |
| | | | | | AI648567, AI355008, AI433157, AI932620, AL039287, AI521596, |
| | | | | | AL046681, AI493559, AI371243, AL042981, AI469764, AI963849, |
| | | | | | AI446536, AL043091, AI285432, AL045166, AW194509, AW197139, |
| | | | | | AL043021, AI539863, AI366900, AI275175, AI963463, AW151970, |
| | | | | | AI366910, AL042488, AI582926, AI355017, AI521551, AI469754, |
| | | | | | AI499463, AL042551, AI371237, AI610362, AI885920, AI440239, |
| | | | | | AL046356, AI537273, AI537191, AI436456, AI371265, AI963846, |
| | | | | | AI567940, AL046137, AI610357, AI817244, AW151131, AI612913, |
| | | | | | AI285826, AI863014, AI521594, AI355765, AI499512, AI889133, AI538881, |
| | | | | | AI805774, AI499508, AI499483, AI282268, AI923061, AI923446, |
| | | | | | AL043089, AI537943, AW087954, AI434255, AI434223, AI697243, |
| | | | | | AI610429, AI434222, AI628850, AI284515, AI284516, AI433968, |
| | | | | | AL133074, AL133049, AL133076, AL133053, AL122101, and Y17793. |
| HCRON75 | 23 | 922386 | 1-186 | 15 -200 | AA040586, AI015787, AA938464, AA479214, AI282749, AA452413, |
| | | | | | AI799916, AA995903, AA902306, AW005485, AI302646, AA730505, |
| | | | | | AW192311, AW273459, AI868755, AI084500, AAI82799, AI418984, |
| | | | | | AI278335, AA017529, AI241303, AA432193, AI004146, AW341825, |
| | | | | | AI400390, T40774, AI803455, W02777, AA354898, AI038039, AI469768, |
| | | | | | AI934274, AA013109, AI537782, AA877238, H07058, T48214, AA978013, |
| | | | | | AI911851, AA776891, AW304390, AW006644, N75836, AI084476, |
| | | | | | AA232952, AA479122, AI932697, AW196023, AI208222, F04445, F01828, |
| | | | | | AI130678, AW190128, T40963, AA644390, AA058919, AI122868, |
| | | | | | AI087324, AA369059, AA243728, AI561065, AI921425, AI828356, |
| | | | | | AA057173, N35151, AI597644, AI336533, AI620708, AA235996, N23222, |
| | | | | | AI816733, W60616, AA587281, AA954671, AI859497, AI357056, |
| | | | | | AW129922, N69671, AI066552, AI434169, AA194995, AA779835, C01287, |
| | | | | | AA243833, AA418568, AA418584, H43864, AA253056, H53350, R85536, |
| | | | | | R75653, W24835, AA629185, AA040558, AA789172, AA194809, |
| | | | | | AA535768, AA479121, and W07476. |
| HCROV23 | 24 | 975245 | 1-667 | 15-681 | Z99396, AW392670, AW372827, AW384394, AL119457, AL119324, |
| | | | | | AW363220, AL119497, AL119522, AL036418, AL038837, AL119319, |
| | | | | | U46351, U46350, AL119341, AL119418, AL037051, AL036725, AA631969, |
| | | | | | AL119484, AL119391, AL119443, AL119496, AI142131, AL038509, |
| | | | | | AL119355, AL119483, AL119396, AL119363, U46341, AL037205, U46349, |
| | | | | | AL119335, AL036858, U46347, AL039074, AL036924, AL119401, |
| | | | | | AL134525, AL134536, AL119399, AL119444, AL037526, AL119439, |
| | | | | | AL037094, AL134531, AL037077, AL037639, AL042551, AL134538, |
| | | | | | AL134902, U46346, AL037082, AL036196, AL039564, AL037085, |
| | | | | | AL036767, U46345, AL038520, AL036190, AL036268, AL036998, |
| | | | | | AL036733, AL037615, AL037021, AL036238, AL037027, AL036765, |
| | | | | | AL036191, AL036679, AL036886, AL036158, AC005822, AR066494, |
| | | | | | AR060234, A81671, AR023813, AR064707, AB026436, and AR054110. |
| HCROZ66 | 25 | 909686 | 1-377 | 15-391 | AAI72248, AA327978, AA279942, and AL137710. |
| HCRPU05 | 26 | 931081 | 1-358 | 15-372 | AL139376. |
| HCRPZ11 | 27 | 973908 | 1-623 | 15-637 | AL119319, AL042551, AL119418, AL119399, AL042542, AL043011, |
| | | | | | AL134518, U46341, AL119497, AL119401, AL119439, AL134528, |
| | | | | | AL042965, AL134538, AL119484, AL119363, AL119391, AL119355, |
| | | | | | AL119443, AL119483, AL042975, AL042896, AL119464, AL043029, |
| | | | | | AL039912, AL042544, AL042970, AL119496, AL042984, AL119304, |
| | | | | | AL043003, AR043113, AB026436, and A81671. |
| HCRQG35 | 28 | 954968 | 1-490 | 15 -504 | AW102682, AI051040, AI868693, W16730, AL134524, AL134110, |
| | | | | | AI142134, AL038983, AL037727, AL039643, AL045327, AL045328, |
| | | | | | AL039432, AL049018, AL047163, AL037295, AL038838, AL037343, |
| | | | | | AI547295, AL042898, AL037436, AL037335, AL037323, AL037443, |
| | | | | | AL038532, AL038822, AL044125, AL037435, AL041347, AL040193, |
| | | | | | AL043923, AL043814, AL047012, AL041238, AL044186, AL040617, |
| | | | | | AL043845, AL038761, AL044162, AL040463, AL047170, AL044037, |
| | | | | | AL041635, AL040294, AL044064, AL041459, AL041577, AL043496, |
| | | | | | AL047219, AL040576, AL040625, AL040472, AL038651, AL045684, |
| | | | | | AL041752, AL045753, AL043538, AL040621, AL046850, AL040768, |
| | | | | | AL046994, AL046914, AL040052, AL041955, AL040444, AL040464, |
| | | | | | AL040510, AL043467, AL043677, AL040839, AL043492, AL041602, |
| | | | | | AL044074, AL041730, AL041523, AL043627, AL041374, AL043848, |
| | | | | | AL043570, AL047183, D29033, AL042135, AL041324, AW372827, |
| | | | | | AL046442, AL039360, AL041133, AL046392, AL045671, AL041098, |
| | | | | | AL039316, AL040322, AL041246, AL040119, AL044272, AL041096, |
| | | | | | AL044258, AL042096, AL041168, AL041163, AL041159, AL119324, |
| | | | | | AL045920, AL040148, AL047057, AL041296, AL040075, AL047037, |
| | | | | | AL037341, AL040458, AL044187, AL048677, AL041358, AL041292, |
| | | | | | AL041086, AL038745, AL045817, AL045990, AL040571, AW392670, |
| | | | | | AL041346, AL041142, AL040332, AL039338, AL079878, AL040529, |
| | | | | | AL079852, AL044199, AL041197, AL046330, AL044274, AL040745, |
| | | | | | AL041233, AL040370, AL040128, AL040553, AL040149, AL047036, |
| | | | | | AL040342, AL038878, AL041186, AL040414, AL039744, AL043941, |
| | | | | | AL041277, AL040285, AI318479, AL037279, AL040155, AL040091, |
| | | | | | AL044165, AL041131, AL040090, AL045989, AL119484, AL041051, |
| | | | | | AL040168, AL041344, AL043775, AL119439, Z99396, U46344, AL038024, |
| | | | | | AL040253, AL119418, AL041227, AL040082, AL036858, AL045857, |
| | | | | | AL135012, AL119399, AI547291, AL040329, AL119319, AL048714, |
| | | | | | AL119457, AL048657, AL047340, AW363350, AL134519, AL036767, |
| | | | | | AL119391, AL037094, AL134530, AL119443, AL036196, AW384394, |
| | | | | | AL119522, U46350, AL041278, U46347, AL043444, AL045494, AW363220, |
| | | | | | AL119497, AL042523, AL042544, AL119363, U46351, AL036190, U46349, |
| | | | | | AL119483, AL119355, AL036773, AL040263, U46341, AL038851, |
| | | | | | AL036418, AL038837, AL119341, AL119335, AL119396, AL040238, |
| | | | | | AL119444, AL037639, AL119496, AL037051, AL036725, AI547258, |
| | | | | | AA631969, AL042420, AL042468, AL040255, AL037205, AL038040, |
| | | | | | AL045725, AL119464, AL134528, AR066494, AR064707, AJ238010, |
| | | | | | AR023813, D17247, A93923, A93916, AR060234, A81671, A93931, |
| | | | | | A85203, AB026436, AL133053, AR069079, AR054110, AL122101, |
| | | | | | AR043113, AC026676, and AC026676. |
| HWLMA84 | 29 | 929421 | 1-202 | 15-216 | AA418995, AL121270, AI370623, AL040844, AI862139, AI927233, |
| | | | | | AW189802, AI522256, AI590043, AI539260, AI540354, AI909661, |
| | | | | | AL042722, AI307513, AA715307, AA809974, AI633317, AL039716, |
| | | | | | AI270183, AI582932, AA748353, AI797578, AI434255, AI064830, |
| | | | | | AI698462, AA761557, AL119863, AI445611, AI758560, AI568293, |
| | | | | | AI932620, AI683555, AI799313, AI690969, AI417790, AI688241, AI571442, |
| | | | | | AI282669, AI537273, AI364167, AI468970, AI624543, AI435253, AI638644, |
| | | | | | AI095003, AA731184, AI909672, AW085181, AI610714, AI919600, |
| | | | | | H44725, AI698391, AI673395, AI635082, AI439452, AI050084, AI673363, |
| | | | | | AA814343, AI800341, AA676361, AI866484, AI079226, AI470717, |
| | | | | | AI679266, AW044367, AI500714, AI610411, AL046466, AI872423, |
| | | | | | AI524179, AW087540, AW087445, AI918809, AI866469, AI799183, |
| | | | | | AW081176, AI299035, AI273179, AW128834, AI521560, AW188525, |
| | | | | | AI915291, AW152182, AI536601, AW262552, AW051088, AF067844, |
| | | | | | Z13966, I89947, M85164, AR050959, E12888, A65340, AF090903, D83032, |
| | | | | | D44497, AL110223, AJ003198, AR038854, AF087943, AF000167, U37359, |
| | | | | | AL122049, AL110158, AL137716, A23327, Y14314, AF129131, AL133051, |
| | | | | | AI2558, A38574, AL117587, AF141289, AF124728, AL117416, AF067844, |
| | | | | | and AF067844. |
| HWLNX76 | 30 | 887583 | 1-522 | 15-536 | AA064845, AF126484, AF113925, AF149774, and AC006027. |
| HWLRA85 | 31 | 965400 | 1-594 | 15-608 | AI493856, AA779066, AI343583, AI668803, AI346964, AI768858, |
| | | | | | AI984669, AW271303, AI962453, AW044292, AI800575, AI191409, |
| | | | | | AI692246, AA633357, AA811380, AI142462, AA761737, AA609336, |
| | | | | | AA568833, AI935515, AW299302, AA599678, AI698071, AI703351, |
| | | | | | AI445511, AA502281, AA765235, AA663918, AI356972, H00731, |
| | | | | | AL040729, AW044281, AI817239, AI040041, AI148133, AA760754, |
| | | | | | AA806273, AI084370, AI088469, AA209476, AA043699, AA167227, |
| | | | | | AA043649, AI184658, AA255603, AA576467, AA614019, AA285129, |
| | | | | | AA255580, AA781637, AI984665, AA025353, AA781325, AI949269, |
| | | | | | AI375319, AI630213, D20127, AA044787, AI918926, AA548537, D58189, |
| | | | | | AA039984, R59874, AA085467, AI537816, H88293, AW271326, AI862141, |
| | | | | | AI500111, AI193531, W32202, AA772611, AA187326, AI391515, |
| | | | | | AA354181, AI355757, AA828122, AA854495, R76720, AA740937, |
| | | | | | AA449425, H49479, AA417831, R79273, Z40227, AA040631, AA450390, |
| | | | | | AI754002, W32257, AF053318, and AL122045. |
| HWLVF04 | 32 | 926880 | 1-704 | 15-718 | AC015517, and AC016566. |
| HWLVO06 | 33 | 933592 | 1-414 | 15-428 | AI628277, AI700170, AI434481, AC004460, and AC004460. |
| HWLVS52 | 34 | 925738 | 1-493 | 15-507 | AC011084, and AC011084. |
| HWLXE16 | 35 | 975258 | 1-455 | 15-469 | |
| HWLXO01 | 36 | 913808 | 1-501 | 15-515 | AF131215, AF131215, and AF131215. |
| HWLZB12 | 37 | 969262 | 1-548 | 15-562 | AA917956, AI078015, AA625053, AI308830, AI348305, AI301350, |
| | | | | | AI343797, AW339860, AA837028, AI275863, AI025643, AI025649, and |
| | | | | | AJ236591. |
| HWNBJ06 | 38 | 933578 | 1-302 | 15-316 | AA213877, AL119483, AL134538, AL134920, U46349, AL043029, |
| | | | | | AL119355, AL134531, AL134533, AL043011, AL119497, AB002334, |
| | | | | | AR060234, and AB026436. |
| HWNBS06 | 39 | 933587 | 1-399 | 15-413 | T28503, AW301137, AL079683, Z98473, AA832148, AI344844, AA483211, |
| | | | | | AA584749, H16048, AAI92695, T12272, T11542, AI951495, AI688846, |
| | | | | | AI345654, AI471691, F19258, AA457639, AW081359, AI015912, |
| | | | | | AA443065, AA366986, AA368745, AW276827, AW193432, AI205126, |
| | | | | | AW439558, AA515051, AI633478, AA843450, AL119391, AI282907, |
| | | | | | AI270343, AI352078, AI345522, AA079528, AI557323, AA338431, |
| | | | | | AI340453, AI184226, AA665192, AI890928, AI890570, AA659083, |
| | | | | | AW265197, AI284640, AI914706, AL133723, AI358343, F31204, AI889781, |
| | | | | | AA745560, AA745431, AA569284, AI801600, AW269639, AW238016, |
| | | | | | AW023672, AA515128, AI064952, AI633390, AI246796, AA658235, |
| | | | | | AI879000, AI433187, AAI76924, AI674873, AI053786, AI721122, |
| | | | | | AI768968, AA169801, AA558003, AA779018, AI951436, AL041412, |
| | | | | | AA252620, AL042753, AI354540, AA364567, AA229785, AA457482, |
| | | | | | F28576, AI567786, AA775230, AA973575, AI569086, AA515435, |
| | | | | | AI138344, AA551509, AI349874, AA828856, AI038279, AW337985, |
| | | | | | AA682189, AI079910, AW243706, AA435854, AA837755, AA745362, |
| | | | | | AI252085, AW130799, AI445436, AI89005, AI252114, AI963786, |
| | | | | | AI890923, AI792903, AI274431, F31796, AI792864, AI733957, AI734002, |
| | | | | | AI929531, AL079645, AI431303, AI003743, AI003172, AI561335, |
| | | | | | AI679713, AA362700, AW162049, F31799, AL042856, F37223, AL046409, |
| | | | | | AI709365, AA501614, H64560, AA878954, AL040324, AW264973, F37286, |
| | | | | | W60516, AI493634, N99715, AW074398, AW172727, AW090811, |
| | | | | | AW193265, AW265393, H94871, AI474713, AA736963, AI872421, |
| | | | | | AI050007, F07193, AA630352, AW080134, AI678392, AA654979, |
| | | | | | AL120235, AI049722, AI345157, F24284, AA353408, N71724, AA652329, |
| | | | | | AA492244, AI124660, AI149915, AI345161, AA348402, AW104748, |
| | | | | | R97987, AI962050, R99852, AI350211, AI608626, AW238278, N74620, |
| | | | | | AA354311, AI341664, AW020483, C06327, AA579249, AI061334, F36273, |
| | | | | | AI435544, AA524832, AI039451, AA482711, AI287964, AI917271, |
| | | | | | AW169230, AI499094, AI471709, AA515224, AI471481, AW166815, |
| | | | | | AI939465, AI521618, AW069807, AA743956, AI613280, N25042, |
| | | | | | AI133721, AL046782, AI963720, AI761471, AI366071, AI679782, |
| | | | | | AI904894, AA470581, H13868, AW274064, AI914151, AA308806, |
| | | | | | AW327360, AA781504, AL038785, AW103415, AW270284, AW419118, |
| | | | | | F29989, AI818332, N43757, T40617, AA626678, AA535661, AI225141, |
| | | | | | AW406755, AI708009, AC005339, AC002492, U86136, AL035587, Z99916, |
| | | | | | Z83845, AC004152, AL132800, AL034429, AC003957, AC007878, |
| | | | | | AL022315, AL022166, AL031665, AB020862, AC004864, AL031673, |
| | | | | | Z98747, Z98950, AC007637, Z84484, Z82206, AL031279, AC006013, |
| | | | | | Z82188, AC005094, AC018633, AF001552, L35668, AF135187, AC005612, |
| | | | | | AL050348, AL035703, Z95114, AL021395, AC008062, AL133297, |
| | | | | | AL035685, AL035588, Z85987, L13709, X03273, AL031296, Z72519, |
| | | | | | AC007388, AL022238, AC005386, AF001905, AC005903, AC004804, |
| | | | | | AC004909, AE000660, AC005722, AL031432, AL049759, AC002395, |
| | | | | | AF155238, AC004989, AC006989, AC006115, AC002111, AL049556, |
| | | | | | AP000208, AP000130, AP000247, AC004915, AC005409, U87943, |
| | | | | | AL008719, AC006130, AC004263, AC007050, AC005696, AC004466, |
| | | | | | AL050341, AL078584, AL022395, AL133233, AC005324, U91321, |
| | | | | | AL031732, U34879, Z99570, AL034549, Z98050, AC002542, AC005873, |
| | | | | | AC006548, AC004381, AC004811, AC004755, AC006127, AC006237, |
| | | | | | AC002564, AC006966, AF002223, Z83844, Z98743, AC004254, AC002997, |
| | | | | | AC004559, AF041427, AF125348, AC004882, AL031446, AL021154, |
| | | | | | AL133371, AC004821, AC006040, AP000497, Y18000, AR060394, |
| | | | | | AL031280, X64467, AP000535, AC005057, AL022327, AF196971, |
| | | | | | AL035423, AL023806, U02507, AL031687, AP001054, AP000513, |
| | | | | | AC004692, AL008708, AC005944, AL031118, AC006061, AF064861, |
| | | | | | U95742, ALI21603, AC003043, AL049553, Z84478, AC005597, AL033543, |
| | | | | | AC010169, AC007245, Z94277, AC005410, AC005820, AC002530, |
| | | | | | AC007014, AF015166, U02532, AL049569, AL031590, AC005387, |
| | | | | | AC005041, AL008716, AL132992, AP000025, Z99571, U57008, X53550, |
| | | | | | L13713, Z85989, L13714, AC006076, AC005954, AL022393, AJ238764, |
| | | | | | AC004990, Z97183, AF061032, AL031229, AC004070, AC002412, |
| | | | | | AC005589, AC002543, AC007308, AC002470, AC007240, AL031651, |
| | | | | | Z85996, AL031257, AL023513, AC005529, AC005895, AC004149, |
| | | | | | AC005940, U79787 AF042836, AC002352, AP001170, AF038667, |
| | | | | | AL031275, AC004150, AC006007, Z94055, AC006480, AJ006996, |
| | | | | | AC007193, AF067844, AC005585, L29766, AC005803, Z84474, AL034451, |
| | | | | | AC007899, Z98742, AF200465, AC006050, AC002381, AC006270, |
| | | | | | AC005296, AL121652, Z49816, AL008721, Z84718, AL035447, X55926, |
| | | | | | AL050312, AC003070, AC006965, AC004712, AC006565, AC005545, |
| | | | | | AL035634, AC006958, AC005694, AC005067, AC002301, AL022397, |
| | | | | | AC005532, AC005048, AC005527, AL009172, AL021026, AL049775, |
| | | | | | AC002429, AF196969, AC002045, AC006241, AC005746, AC005485, |
| | | | | | AB012229, Z99774, AC006153, AP000964, Z98043, AB020861, AC007848, |
| | | | | | AC007161, AC004533, AL031259, AL008730, AL049760, and AC005996. |
| HWNCY59 | 40 | 927487 | 1-224 | 15-238 | AA458703, AA476397, AA937427, AA618452, AI334443, AA508359, |
| | | | | | AW270343, AW440497, AA126519, AL038705, AL045053, AA082567, |
| | | | | | AI792231, AA551552, AA482953, H53828, AI754253, AW084466, |
| | | | | | AW193410, AA216412, AA508902, AA547947, AL119691, AA657835, |
| | | | | | AW081165, AW275510, R73380, AA468244, W93917, AI002744, |
| | | | | | AA490183, AA431949, R02632, AI004704, AW192179, AA478355, R44116, |
| | | | | | AW238121, AA493975, AI306191, AI305894, AI754653, AA838190, |
| | | | | | AI110844, AW302087, AI766906, AI954260, R45369, T69264, AW302080, |
| | | | | | AC004675, AC004656, AF088219, AC002123, AF165926, AC007510, |
| | | | | | AC005233, AC007564, AJ011930, AC005832, AF031078, AF030876, |
| | | | | | AL121652, AC005015, Z98884, AB026898, AL078638, AC007546, |
| | | | | | AC006965, AL031681, AC004815, AP000213, AP000135, AP000031, |
| | | | | | AC005399, AC005224, AL031311, AL035685, U95742, AL035423, |
| | | | | | AC007688, AL023799, AC007172, U91323, AC004841, AC007536, |
| | | | | | AC005291, AC016026, AC008014, AL020996, AC006978, AC004881, |
| | | | | | AC007566, AL031428, AC004159, AC002553, AC007537, AC002449, |
| | | | | | AL096711, AC003101, AL034402, AC006501, AC003029, AL031283, |
| | | | | | AC006333, Z98941, AL109984, AP000347, AC002289, AP000100, |
| | | | | | AC007226, AC005409, AC007161, AC005529, AC005229, AC004813, |
| | | | | | AC004230, Z83838, Z95116, U29953, AL035587, AC002991, AL035450, |
| | | | | | AC004821, AL049830, AC005280, AL049699, AC005480, AP000704, |
| | | | | | AC004549, AL031594, AL021393, AP000553, AC008044, AC007052, |
| | | | | | AL008732, AC005207, AP000498, AC004167, AC005069, AC009411, |
| | | | | | AC002470, AC005414, AP000556, AL035603, AF207550, AP000552, |
| | | | | | AC005971, AC005920, AP000008, AC005620, AC004019, AC005011, |
| | | | | | AP000959, AC008170, AC008372, Z93023, AC005932, AP000967, |
| | | | | | AC004934, Z81369, AP000503, AC005527, AL109952, AC005300, |
| | | | | | AL109865, AJ003147, AP000359, AC005578, AC005972, U47924, |
| | | | | | AC009516, AC006511, AL022320, AC005088, Z95114, Z97054, AP000253, |
| | | | | | AC002350, AC002312, AC004024, AC008994, AL023553, AF134726, |
| | | | | | Z86090, AL079295, AL133386, AC004400, AC006487, AL031680, |
| | | | | | AC005844, U91318, AC007684, AL078581, AC005231, AL035455, |
| | | | | | AC007227, AC004678, AC004526, AC007225, AC004485, AC006524, |
| | | | | | AC002369, AC005048, AC000379, AC004874, AC006111, AL022067, |
| | | | | | AC006101, AC002558, AL117352, AC005358, AC007363, AL049869, |
| | | | | | AC006998, AC006241, AC004686, AC004797, AC005362, AL021978, |
| | | | | | AL093280, AC006449, AC006285, AP000558, AL132987, AC010202, |
| | | | | | AC007216, AC005500, AC004890, U85195, AL031659, L78810, AC005952, |
| | | | | | AC004659, AC005725, AP000517, AC002549, AC016025, AP000513, |
| | | | | | AC002133, AF165142, AC005768, AC007055, AC005081, AC002115, |
| | | | | | AC012085, AC008040, AL109653, AC004929, AL133448, AC005251, |
| | | | | | Z82198, AC005495, AE000658, AC004099, AC006385, U52112, AC002430, |
| | | | | | AL035420, Z85986, AC002472, AF029308, U66059, AC005046, AC009247, |
| | | | | | AC004712, AC005288, AC005899, U95740, AC006288, Z94801, AC005180, |
| | | | | | Z98036, AC006138, AC007384, AC004832, AC005538, and Z86062. |
| HWNEO76 | 41 | 929720 | 1-347 | 15-361 | AC005752, AC074130, AC074130, AC008579, AC008579, AC005752, |
| | | | | | AC005752, and AC005752. |
| HWNEX05 | 42 | 928784 | 1-231 | 15-245 | AL356356, AL356356, andAC053497. |
| HWNFZ48 | 43 | 933522 | 1-388 | 15-402 | AC007227, AL135927, AL135927, AL135927, AC007227, AC007227, and |
| | | | | | AC007227. |
| HWNGN09 | 44 | 961602 | 1-442 | 15-456 | AL045232. |
| HWNHA12 | 45 | 969205 | 1-769 | 15-783 | AL354720, AL354720, and AL354720. |
| HWNHN10 | 46 | 961609 | 1-659 | 15 -673 | AA912130, AI240479, AA815414, AI809506, and AA969138. |
| HWNDU11 | 47 | 965382 | 1-479 | 15 -493 | AA195743, AC025332, AC025332, AC073532, AC073532, and AC073532. |
| HWNCN05 | 48 | 928791 | 1-942 | 15-956 | N93301, AI039653, AW268575, W25153, AI818415, AW271345, and |
| | | | | | AI675486. |
| HWNBX05 | 49 | 928800 | 1-402 | 15-416 | H11279, AC010087, AC010087, and AC010087. |
| HWNBL12 | 50 | 969222 | 1-432 | 15-446 | AL135067, AI378370, AI351880, AI138478, AA679780, AC006344, |
| | | | | | AC006344, AC023303, AC023303, and AC023303. |
| HWNAL06 | 51 | 933591 | 1-466 | 15-480 | AA453147, AC022133, and AC022133. |
| HWNAE01 | 52 | 914082 | 1-1052 | 15-1066 | AA705184, AI247864, N92043, N68830, H53322, R50487, H53323, |
| | | | | | AI379225, R50572, AC016333, AC016333, AC016333, and AC027126. |
| HWMBY62 | 53 | 937234 | 1-665 | 15-679 | AA033973, AW204163, AI818304, AW081429, AI214706, AA399495, |
| | | | | | AA525779, AA631754, AA398154, AA515710, AA190519, AA190482, |
| | | | | | AA365169, AF109219, AL137607, AC011123, AC011123, AC011123, |
| | | | | | AP001562, AP001562, and AP001562. |
| HWMBM89 | 54 | 968984 | 1-491 | 15-505 | AI762892, AI760766, AI189223, AI824008, N30895, AI927354, AA443809, |
| | | | | | AI372949, W81043, AI299589, AI934550, AA605197, W81079, AI168782, |
| | | | | | AW374587, AI538814, AW079505, and AA447177. |
| HWLXJ10 | 55 | 963328 | 1-521 | 15-535 | AW000952, AW451313, AW028154, AW235849, AL042898, AL134524, |
| | | | | | AL045328, AL045327, AL047163, AL134110, AL037295, AL038838, |
| | | | | | AL038983, AL037335, AL037343, AL037323, AL037436, AI142134, |
| | | | | | AL047037, AL038878, AI547295, AL037443, AL037727, AL038532, |
| | | | | | AL038822, AL038761, AL037435, AL135012, AL040576, AL041955, |
| | | | | | AL045753, AL040472, AL039643, U46344, AL038745, AL039360, |
| | | | | | AL038651, D29033, AL049018, AL045891, AL048677, AL043089, |
| | | | | | AL042655, AL039432, AL043321, AL038040, AL043941, AL045494, |
| | | | | | AI318479, AL042523, AL048657, AL046356, AL038041, AL042420, |
| | | | | | AL042741, AL038024, AL042468, AW363350, AI547258, AL031651, |
| | | | | | AR066494, AL133053, AL122101, AL133049, D17247, A93923, A93916, |
| | | | | | A93931, A85203, AL133074, and AR023813. |
| HWLVU33 | 56 | 972979 | 1-525 | 15-539 | AA775419, AI273235, AI754154, AI446402, AI640735, AI468600, |
| | | | | | AA602645, AA460180, AI675266, AI382693, R40043, AA813916, |
| | | | | | AC016757, and AC016757. |
| HWLVK02 | 57 | 922696 | 1-580 | 15-594 | AA916685, AI913975, AI186460, N64366, AW003622, AI209045, |
| | | | | | AW383922, AI186495, AA988844, AA505627, and AC026691. |
| HWLUY15 | 58 | 874966 | 1-455 | 15-469 | AA813464, AI299894, AC021094, AC021094, AC020664, AC020664, and |
| | | | | | AC020664. |
| HWLQS70 | 59 | 933799 | 1-615 | 15-629 | AI692670, AI983514, AI659461, AA857943, AA848022, AW023325, |
| | | | | | AAI50963, AA856775, AI333521, AI350586, AI057121, AI743582, |
| | | | | | AI093682, AI039079, AA811978, AA621091, AA737208, AI350364, |
| | | | | | AA522951, AW302375, AI381406, AA639131, AA903924, AA890276, |
| | | | | | AA210835, AA258236, AI690470, AA214632, AA736622, AI015154, |
| | | | | | AA701126, AI015739, AW149922, AA259080, AA743600, AL161797, and |
| | | | | | AL161797. |
| HWLQA64 | 60 | 918932 | 1-237 | 15-251 | R44785, AW296584, AI698918, AI435319, AI124890, N26029, AI652245, |
| | | | | | AI524315, AA243863, AI743693, AI148476, AA830427, AA934726, |
| | | | | | AI828768, AA481312, N27950, AA602331, AA918069, AA463272, |
| | | | | | AI431707, AI858382, AA644278, AI990803, AI081819, AI264927, |
| | | | | | AW274632, AA283019, AI379553, AI830530, AAI95654, AA234974, |
| | | | | | N67908, N62389, AW300062, H97988, AA772368, AI824287, AI590043, |
| | | | | | AL045619, AI866465, AA641818, AI539800, AI815232, AI868204, |
| | | | | | AI500714, AI355779, AI581033, AI537677, AL046466, AA715307, |
| | | | | | AA809974, AI538885, AL042416, AI582932, AW025943, AI889189, |
| | | | | | AI554827, AW055075, AL046618, AA761557, AI801325, AI859991, |
| | | | | | AW162194, AI872423, AI494201, AI521560, AI500659, AI500523, |
| | | | | | AI538850, AI471909, AI366900, AI923989, AI284517, AI500706, AI445237, |
| | | | | | AI491776, AW151138, AW151974, AI500662, AW172723, AI284509, |
| | | | | | AI440263, AI889168, AI866573, AI633493, AI434256, T99953, AI273179, |
| | | | | | AI805769, AI434242, AI888661, AI284513, AI888118, AI436429, AI889147, |
| | | | | | AI371228, AI440252, AI491710, AL047422 AI866786, AI860003, |
| | | | | | AI610557, AI242736, AI433037, AI887499, AI539781, AI539707, AI433157, |
| | | | | | AI923509, AI559957, AI521571, AL043168, AL042488, AI671642, |
| | | | | | AW161202, AI439995, AI089469, AI890907, AI582912, AI364788, |
| | | | | | AL039390, AW083804, AI539771, AI343091, AW191003, AI309443, |
| | | | | | AI570774, AI828574, AI923046, AI349276, AL048375, AI269862, |
| | | | | | AI887785, AA748353, AC005575, S68736, X72889, AL122049, AL133637, |
| | | | | | AL133113, X80340, AL133072, AL133080, AL122110, AL133081, |
| | | | | | AL133077, AL137283, Y10655, AL122050, AL049423, X70685, AL117583, |
| | | | | | AF081195, E07361, I17767, U90884, AL137526, AL133640, 146765, |
| | | | | | AL117585, AL117578, U49434, AL122123, AC005575, AC005575, |
| | | | | | AC005575, AC026272, AC026272, and AC026272. |
| HWLOL02 | 61 | 918320 | 1-424 | 15-438 | AW205701, AA885386, AA639272, AI185575, AI095130, AI539690, |
| | | | | | AA765760, AW150557, AW301409, AI866465, AL045995, AW022713, |
| | | | | | AA668621, AI859899, AI680221, AW129117, AI285448, AW079511, |
| | | | | | AI521136, AI373276, AL038185, AI913476, AL042899, AL042898, |
| | | | | | AW020693, AI921155, AC006313, AL049426, AF106657, AF118070, |
| | | | | | AC012309, AC012309, AC068942, AC068942, AC016590, and AC016590. |
| HWLOB68 | 62 | 908500 | 1-592 | 15-606 | N20488, N25521, AW392670, Z99396, U46347, AL036418, AL038837, |
| | | | | | AL037051, AL036725, AA631969, AW384394, AL039074, AL119484, |
| | | | | | AW363220, AL036924, AL036858, AW372827, AL119457, AL038509, |
| | | | | | AL043003, AA648406, AL039564, AL039085, AL119497, AL039156, |
| | | | | | AL119439, AL039108, AL119319, AL039109, AL039128, AL119324, |
| | | | | | AL036190, U46351, AL043147, AL119443, AL037639, AL119391, U46350, |
| | | | | | AL037094, AL036767, AL039659, AL119522, AL037526, AL036196, |
| | | | | | AL119483, AL119363, AL119355, U46341, U46349, AL038531, AL119341, |
| | | | | | AL119396, AL119335, AL134519, AL037082, AL037077, AL119418, |
| | | | | | AL042909, AL134132, AL038520, AL119496, AL039625, AL039648, |
| | | | | | AL134530, AL045337, AL134531, AL134527, AL134528, AL119444, |
| | | | | | AL037205, AL036268, AL134533, AL042975, AL039678, AL039629, |
| | | | | | AL039386, AL037027, AL037085, AL134538, AL039423, U46346, |
| | | | | | AL037615, AL038851, AL039150, AL040992, AL042614, AF205588, |
| | | | | | AJ245586, AJ245587, AR066494, AR060234, A81671, AR023813, |
| | | | | | AR064707, AR069079, AB026436, and AR054110. |
| HWLNC88 | 63 | 875790 | 1-558 | 15-572 | AI634844, AI039734, AI373240, AA558783, AC074274, and AC074274. |
| HWLNA36 | 64 | 974863 | 1-636 | 15-650 | AI767588, AI635347, AI640606, AI991689, AA977785, AI979247, |
| | | | | | AA971157, AI687230, AI873792, AAI52394, AI244588, AA761110, |
| | | | | | AI126673, AA491080, AA679080, AI913234, AI920850, AI018184, |
| | | | | | AA702114, AA377229, AA436906, R81654, AI741350, R50230, AF222340, |
| | | | | | AF106037, AF183569, and AB011097. |
| HWLMI16 | 65 | 918726 | 1-387 | 15-401 | AA427809, T10788, AC025108, AC025108, and AC067952. |
| HKCTA23 | 66 | 877228 | 1-486 | 15-500 | R80472, R64402, AC009293, AC009293, AC036167, and AC036167. |
| HCYBO59 | 67 | 520114 | 1-407 | 15-421 | AA305759, AI648536, AI870450, H53564, AW364689, AW168274, |
| | | | | | AI915135, H53563, H61027, AI252294, AI054391, AW304586, AI053974, |
| | | | | | N49703, AW271152, AW302049, AA342004, AI085785, H53538, C14331, |
| | | | | | C14429, D80166, C14389, C15076, D58283, D80022, D59927, D59502, |
| | | | | | D80043, D80227, D51799, D59859, D59467, D80195, D51423, D59619, |
| | | | | | D81030, D80210, D80391, D80164, D59275, D80240, D80253, D59787, |
| | | | | | D50995, D80212, D80269, D80196, D80188, D80219, AA305409, D50979, |
| | | | | | D57483, D80366, D80038, D59889, D80193, D80378, D59610, D80024, |
| | | | | | D80241, D80045, C14407, 051060, D51022, T03269, AW178893, |
| | | | | | AW177440, AA305578, C75259, AW179328, D80134, C14014, AW378532, |
| | | | | | D81026, AA514188, D80248, AW178775, AW369651, D80251, D80522, |
| | | | | | AW178762, F13647, D51250, AI910186, D80168, D58253, AW177501, |
| | | | | | AW177511, AA514186, D80133, AW360811, AW352158, D80132, |
| | | | | | AW352170, C14227, C05695, AW352117, AW176467, AW375405, D81111, |
| | | | | | C14298, D80268, AW377671, D80064, AI905856, AW366296, AW360844, |
| | | | | | AW375406, AW360817, AW378534, D59373, AW179332, AW377672, |
| | | | | | AW179023, AW178905, Z21582, D80247, AW378540, D80302, AW352171, |
| | | | | | D80439, AW377676, AW178906, AW177505, AW177731, AW178907, |
| | | | | | AW179019, AW179024, D51097, T11417, AW179020, AW352174, |
| | | | | | AW360841, AW178909, AW177456, AW179329, AW178980, AW177733, |
| | | | | | AW378528, AW178908, AW178754, AW179018, AA285331, AW360834, |
| | | | | | D51103, AW179004, AI557751, AW179012, AW367967, AW178914, |
| | | | | | AW378525, D80157, AW177722, AW177728, C14077, D58101, AW179009, |
| | | | | | D51759, D59503, AW178774, AW178911, AW378543, AW352163, |
| | | | | | AW179220, D58246, C14344, AW178983, AW352120, D80014, AW178781, |
| | | | | | T48593, C06015, D59627, C03092, AW177508, AW177723, D59653, |
| | | | | | D80258, AI535850, C14975, D45260, D51213, AW378533, AW367950, |
| | | | | | H67866, AA809122, AW177497, H67854, D80228, AI535686, AI557774, |
| | | | | | AW178986, AI525923, T03116, AI535961, D45273, T02974, D51231, |
| | | | | | AW177734, AI525917, D59317, AI525912, C14973, D60010, D51221, |
| | | | | | AI525920, D59474, T03048, AA514184, C14046, D59551, C14957, D60214, |
| | | | | | AI525227, AF006514, A62300, A84916, A62298, AJ132110, AR018138, |
| | | | | | AF058696, X67155, Y17188, D26022, A25909, AR008278, A67220, D89785, |
| | | | | | A78862, D34614, AB028859, D88547, X82626, Y12724, AR025207, |
| | | | | | A82595, A94995, AR060385, AB002449, AB012117, AR008443, AR066482, |
| | | | | | X68127, I50126, I50132, I50128, I50133, A85396, A44171, A85477, U87250, |
| | | | | | AR066488, I19525, AR016514, A86792, AR060138, A45456, A26615, |
| | | | | | AR052274, X93549, AR066490, Y09669, A43192, A43190, AR038669, |
| | | | | | AR066487, I18367, AR054175, A30438, D88507, I14842, D50010, Y17187, |
| | | | | | A63261, AR008277, AR008281, AR008408, AR062872, A70867, AR016691, |
| | | | | | AR016690, U46128, AF135125, D13509, A64136, A68321, AR060133, |
| | | | | | I79511, U87247, AB033111, U79457, AF123263, X93535, AB023656, |
| | | | | | AR032065, AR064240, and AR008382. |
| HCYBL79 | 68 | 888275 | 1-462 | 15-476 | AA922273, AI218568, AA305614, AI077416, N67108, AW000975, |
| | | | | | AI080088, AW270427, AW268569, AI312095, AI472929, R34604, |
| | | | | | AL021920, AL355800, AL355800, AL162261, AL162261, AL355149, |
| | | | | | AL355149, AL137798, AL137798, AL137798, AL137802, AL137802, |
| | | | | | AC018593, AC018593, AC018593, AC021338, AC021338, AC015618, |
| | | | | | AC015618, AL356957, AL356957, AL356957, AL162612, AL162612, |
| | | | | | AL162612, AC024468, AC024468, AC024468, AL358813, AL358813, |
| | | | | | AL358813, AL021920, AL021920, and AL021920. |
| HCRQB03 | 69 | 922880 | 1-533 | 15-547 | AA568716, AW449659, R44623, AA460549, AI351558, AI809818, R92007, |
| | | | | | AI886414, AI245405, H95380, AA743742, AI783561, AW243862, |
| | | | | | AA632360, AA506121, AA811920, AI734201, AA501649, AC003960, |
| | | | | | AC002540, AC005082, AC004477, AC007395, AC009516, AF196969, |
| | | | | | AC000120, AC004126, AC007011, AC004033, AC007731, AC005500, |
| | | | | | AP000432, AB023049, AF001549, AC003035, AC002426, AC007130, |
| | | | | | AC011676, and AC011676. |
| HCRPQ40 | 70 | 881408 | 1-656 | 15-670 | AI817642, AI689047, AI208335, AA878428, AW450426, AA469160, |
| | | | | | H92073, AA469161, AA482940, AA171728, AA425285, W45360, |
| | | | | | AW242060, AI587648, AI619496, AI952227, AI587188, AI699819, |
| | | | | | AA911674, AI952480, AW275824, AA642893, AI269458, AI698520, |
| | | | | | AI888262, AI394549, AA031518, AI969614, AW118691, AI284498, |
| | | | | | AI753871, AI920801, AA625676, AW073829, AA732340, AA873305, |
| | | | | | AI282233, AW243745, AI266144, AI923244, AA804446, AA233919, |
| | | | | | AI689027, AW014369, W33158, AA173171, AA857122, AA971825, |
| | | | | | AW438570, AI745482, AW081987, N78892, N72081, AI318399, AI244531, |
| | | | | | AA028932, AI674601, AI264459, N34434, AI357346, AA524134, C05912, |
| | | | | | AI039387, AI281999, AW268377, AI347595, AA526733, AA587489, |
| | | | | | AI003780, AA593927, AI285454, AI866346, AI432966, AA620322, |
| | | | | | AI538092, C05822, AA580607, AA902766, AA999791, AI289778, |
| | | | | | AI004284, AA773432, R40653, AI041163, C05783, AW118245, AI811394, |
| | | | | | AI038446, AI758393, H92123, AW130927, AI207700, AI202520, AI151374, |
| | | | | | W78172, AA653384, AI680368, AI184262, AI985324, AI301547, AI890515, |
| | | | | | AW051805, AI245634, AA157835, AI985603, AW193115, AI589409, |
| | | | | | D19685, AI697319, AI679231, AI679808, AI073919, AI369852, N74461, |
| | | | | | AAI26449, AI684312, AI950695, AA447084, AI042116, T34717, |
| | | | | | AA628448, AA463891, H15421, F10166, AA164596, AI620027, AI471088, |
| | | | | | Z38930, AA576917, AI360744, AA101171, AI934234, AI800825, |
| | | | | | AW023962, AA670056, AW183764, AA614832, AA001197, R23243, |
| | | | | | H02773, AWI31908, AA284761, AA476282, AI420910, AA533892, |
| | | | | | AI811368, AI679809, AA902495, N63998, W65422, AA508153, AA662794, |
| | | | | | AA759338, AW082154, AA779581, AI432564, AI954929, AI263036, |
| | | | | | AI287506, AW150468, H42487, R79704, AI245097, AI866355, AI671650, |
| | | | | | AI689273, AW050398, AI192070, AI784260, H06866, AW149912, R41968, |
| | | | | | AA402619, AA402555, H95957, AI750338, AA360537, AA357362, T85100, |
| | | | | | T10709, AA719452, AI933485, AA234168, AW166325, AW196186, |
| | | | | | AI696438, C02110, AA284762, AA292691, AA494213, AA433814, |
| | | | | | AC048340, AC048340, AC048340, AC055713, AC055713, and AC055713. |
| HCRPE30 | 71 | 910021 | 1-110 | 15-124 | AB014604, and AC003093. |
| HCROA43 | 72 | 948286 | 1-797 | 15-811 | Z99396, AL038837, AL037051, AL036725, AL036418, AA631969, |
| | | | | | AL039074, AL036924, AW392670, AL039564, AL039085, U46350, |
| | | | | | AL036858, AL039156, AL039108, AL039109, AL038509, AL039128, |
| | | | | | AL037094, AL039659, AL038531, AL119457, AL036196, AW384394, |
| | | | | | AW363220, AW372827, AL039625, AL039648, AL119522, AL045337, |
| | | | | | AL119497, AL119319, AL036767, AL038447, AL037082, AL119391, |
| | | | | | AL037526, AL037639, AL036190, AL119443, AL119324, AL039678, |
| | | | | | AL039629, AL119363, AL119484, AL039423, AL036238, AL039150, |
| | | | | | AL040992, AL038520, AL042909, AL119483, U46351, AL119355, |
| | | | | | AL119496, U46346, U46341, U46347, U46349, AL037077, AL119418, |
| | | | | | AL119341, AL119335, AL038851, AL134524, AL119396, AL037726, |
| | | | | | AL039386, AL036268, AL039410, AL119439, AL037085, AL119444, |
| | | | | | AL037205, AL036998, AL037615, AL134902, AL037178, AL036733, |
| | | | | | AL042965, AL119401, AL134527, AL134538, AL036679, AL042542, |
| | | | | | AL042614, AI142134, AL036191, AL037027, AL119399, AL042984, |
| | | | | | AL042975, AL045353, AL036765, U46345, AL043003, AL119488, |
| | | | | | AL042544, AL036719, AL043019, AL036973, AL042551, AL043029, |
| | | | | | AL042450, AL037054, AL037021, AL119464, AL036774, AL036836, |
| | | | | | AL036158, AL036999, AL036886, AR066494, AR060234, AR023813, |
| | | | | | A81671, AR064707, AR069079, AB026436, AR054110, AC074373, and |
| | | | | | AC074373. |
| HCRNR03 | 73 | 922819 | 1-748 | 15-762 | AI025752, AI031574, AA488791, Z44604, AA007253, AI652016, |
| | | | | | AW296312, AL139185, AL139185, AL138695, AL139181, and AL139181. |
| HCRND06 | 74 | 934631 | 1-601 | 15-615 | AI521755, AI038605, AA969113, AA913828, AI377005, AI261324, |
| | | | | | AW052138, AI474795, Z39645, AI636293, AI807319, R36992, AI348623, |
| | | | | | AI699951, AI239432, AL134524, AL045328, AL042898, AA923073, |
| | | | | | AL038838, AL037343, AL038983, AL037436, AI142134, AL037335, |
| | | | | | AL037323, AL037443, AL037727, AL038532, AL038761, AL047012, |
| | | | | | AL044125, AL038822, AL037435, AL040193, AL044162, AL041347, |
| | | | | | AL040621, AL043538, AL043496, AL040464, AL041238, AL043923, |
| | | | | | AL043814, AL044186, AL040617, AL040463, AL047170, AL042135, |
| | | | | | AL043845, AL041324, AL044037, AL047183, AL047219, AL041635, |
| | | | | | AL040294, AL041098, AL044064, AL041459, AL041577, AL040625, |
| | | | | | AL040576, AL045684, AL041752, AL045753, AL134110, AL046850, |
| | | | | | AL040768, AL040510, AL043467, AL046994, AL046914, AL040052, |
| | | | | | AL040444, AL043677, AL040839, AL043492, AL041602, AL044074, |
| | | | | | AL041730, AL041523, AL043627, AL041374, AL041246, AL043848, |
| | | | | | AL043570, AL040472, AL041163, AL046442, AL041133, AL041096, |
| | | | | | AL041955, AL045671, AL040322, AL039643, AL039316, AL040119, |
| | | | | | AL041296, AL046392, AL039360, AL037295, AL047057, AL047163, |
| | | | | | AL040075, AL044272, AL041086, AL044258, AL041168, AL042096, |
| | | | | | AL041358, AL041159, AL045920, AL040148, AL049018, AL040458, |
| | | | | | AL044187, AL037341, AL041346, AL041233, AL041292, AL045817, |
| | | | | | AL045990, AL041142, AL040571, AL040149, AL040332, AL038745, |
| | | | | | AL040529, AL047036, AL041197, AL039338, AL079878, AL046330, |
| | | | | | AL040745, AL040370, AL044274, AL044199, AL040128, AL041277, |
| | | | | | AL040342, AL040553, AL047037, AL041186, AL040414, AL039744, |
| | | | | | AL045327, AL040285, AL040155, AL040091, AL045989, AL044165, |
| | | | | | AL041131, AL040090, AL046327, AL041051, AL043941, AL040168, |
| | | | | | AI547295, AL044201, AL043775, AL040253, AL037279, AL041227, |
| | | | | | AL045857, AL040082, AL079852, AL043444, AL040329, AL039432, |
| | | | | | AL041278, AL040263, AL040238, AL040255, AL045725, AL041140, |
| | | | | | AL039915, AL043612, AL044529, AI557864, T18597, AL038651, |
| | | | | | AL079977, AL041344, AI535813, D29033, AA585439, AL049069, |
| | | | | | AL041210, AL038878, AI525556, AI526158, AI541205, AI557262, |
| | | | | | AI547006, AA585453, AW339250, AL048677, AA174170, AA283326, |
| | | | | | AI557731, R28735, R29445, R29218, R28895, AI526176, R45895, R29177, |
| | | | | | T11028, T10982, AI557602, AA585476, D59436, R28967, R28965, |
| | | | | | AI541356, AA585101, D61254, Z28355, R28892, AI557808, AI546875, |
| | | | | | AI557734, AI526184, AI525306, AI541374, AL043537, D57491, T23957, |
| | | | | | C16300, AI541321, AA585329, T23985, U46344, AI541508, AI541523, |
| | | | | | AI546999, D55233, C14723, AI541346, AI547291, C16305, AL045211, |
| | | | | | AI318479, Z32822, AL046147, Z93242, AR064707, AR066494, AJ238010, |
| | | | | | A93923, AF082186, Z32836, I05558, D17247, A20702, A43189, A43188, |
| | | | | | A20700, A98420, A98423, A98432, A98436, A98417, A98427, A93016, |
| | | | | | A35537, A35536, A02136, A04664, A02135, A04663, A60212, A60209, |
| | | | | | A60210, A60211, A93916, I62368, D50010, E03627, AJ244003, AJ244004, |
| | | | | | I48927, AJ244005, Y16359, I08389, E17098, A98767, A58524, A93963, |
| | | | | | A93964, AR062872, I63120, AR062871, AR017907, 106859, AR062873, |
| | | | | | A18050, A23334, A75888, I70384, A60111, A23633, AR007512, A25909, |
| | | | | | D78345, A93931, A58523, E13740, I84553, I84554, A11245, A81878, |
| | | | | | D13509, AB025273, AR038855, A90655, D13316, X81969, I08396, A02712, |
| | | | | | A77094, A77095, A95051, AI8053, A64973, AR031566, I00682, A11624, |
| | | | | | A11623, E00609, A11178, E01007, A86792, I13349, A10361, A22738, |
| | | | | | A84774, AJ230972, AR043601, I01995, I25027, I26929, I44515, I26928, |
| | | | | | I26930, I26927, I08051, A85395, A70872, A85476, I44681, X83865, A84772, |
| | | | | | A84776, A84773, A84775, AR067731, AR037157, AR054109, AR067732, |
| | | | | | A58522, A91750, I15718, I28266, I66495, I66494, M28262, I15717, I66498, |
| | | | | | I66497, I66496, I66486, I66487, I03331, E12615, A02710, AR035193, |
| | | | | | A92133, E14304, A07700, AI3393, AI3392, AR031488, I13521, I52048, |
| | | | | | A27396, AR027100, I49890, I44531, I21869, A91965, I44516, A70040, |
| | | | | | E16678, A82653, E16636, I19525, AR063812, A24783, A24782, AF149828, |
| | | | | | AJ230845, AJ230935, A95117, S60422, Y14219, I60241, I60242, AJ231028, |
| | | | | | I08395, A06631, AJ230902, AJ244007, A22734, AR051957, AJ230951, |
| | | | | | I05845, A85203, I18895, A20699, E00696, E00697, B03813, I66482, |
| | | | | | AR009151, I66485, I66483, I66484, AR038066, AR027099, AJ231009, |
| | | | | | AJ230867, AR051652, A16035, AL133053, AR051651, AL122101, I03669, |
| | | | | | I03668, AR022273, AR008429, AL133074, I33632, AJ230996, AL133049, |
| | | | | | AR035975, AR035974, AR035977, AR035976, AR035978, AL133082, |
| | | | | | E03654, AR054723, A22739, AR023813, A05993, and A05991. |
| HCRMX10 | 75 | 963663 | 1-669 | 15-683 | AI074053, AI733195, AI793125, AI805776, AA937728, AC007615, |
| | | | | | AC007615, AC009093, AC009093, and AC009130. |
| HCRMG11 | 76 | 965918 | 1-437 | 15-451 | AA400298, AA401412, AI243657, AI214420, AI698759, AL119457, |
| | | | | | AA885403, AL042544, AL042382, AL119399, AL079794, AI624279, |
| | | | | | AL049085, AL042745, AL079977, AW082113, AL045266, AL040243, |
| | | | | | AL119748, AL045500, AI491852, AW087445, AI610362, AI269862, |
| | | | | | AI801325, AI500662, AI284517, AI499285, AI499463, AI275175, AI796743, |
| | | | | | AL039276, AI433976, AI433157, AI539771, AL043326, AI537677, |
| | | | | | AI500659, AI500523, AI500706, AI491776, AI445237, AW151138, |
| | | | | | AL042628, AI633493, AI917055, AL079963, AL041862, AL037081, |
| | | | | | AI284484, AL042551, AI538716, AI802542, AI648509, AW170635, |
| | | | | | AI364788, AI345416, AI432666, AW080402, AI872545, AW071349, |
| | | | | | AA225339, AI284509, AL079741, AI815232, AI620284, AW132056, |
| | | | | | AI886753, AI815855, AL036403, AL036361, AI499381, AL042744, |
| | | | | | AI890833, AI926790, AI281772, AI889133, AL040097, AW059713, |
| | | | | | AI440239, AW104724, AI654276, AW051258, AI637584, AI559296, |
| | | | | | AI862139, AW301505, AL119324, AI564719, AI560099, AI619502, |
| | | | | | AI677796, AI335449, AI269205, AW026882, AI702068, AI624084, |
| | | | | | AL039086, AW262565, AI433037, AI702073, AI436456, AI624206, |
| | | | | | AI682841, AW008048, AI345612, AI955917, AI696612, AI567940, |
| | | | | | AI274508, AI432656, AI476046, AL042538, AI431975, AI889376, |
| | | | | | AL037454, AL038605, AL045163, AI524671, AI612913, AI921248, |
| | | | | | AI632408, AI684279, AI873644, AI863014, AI783504, AI499512, AI567993, |
| | | | | | AI349598, AI922901, AI289937, AI874261, AW302988, AL121365, |
| | | | | | AI648663, AI611738, AI872711, AI633125, AL045620, AL046931, |
| | | | | | AI521012, AL043981, AW071417, AI434223, AL042787, AI633330, |
| | | | | | AL041772, AI610402, AI819976, AI816010, AI620003, AI580435, |
| | | | | | AL121270, AI308035, AI623396, AI439350, AI627360, AW150578, |
| | | | | | AW403717, AL134830, AI280637, AI590118, AI621209, AI679174, |
| | | | | | AI537515, AL119791, AA508692, AI285826, AW074993, AW059837, |
| | | | | | AI702406, AI536685, AI064830, AI571909, AW081653, AI432969, |
| | | | | | AL036780, AW081036, AI569583, AI284131, AI613270, AL110402, |
| | | | | | AI475371, AA806720, AL036396, AW193911, AW117882, AL036980, |
| | | | | | AI348897, AI610307, AW149869, AW191916, AW103371, AI254731, |
| | | | | | AI818980, AI538085, AI349004, AI281773, AI963846, AI799183, AI249323, |
| | | | | | AW268220, AI866608, AL119863, AI608936, AW238730, AI866457, |
| | | | | | AI274013, AI554245, AI500146, AJ620287, AI554818, AL040827, |
| | | | | | AI521560, AI536638, AL036146, AI491897, AI933589, AW161579, |
| | | | | | AI434256, AI284513, AW117746, AI801152, AI633419, AW087462, |
| | | | | | AI538829, AI805762, AI349256, AI445025, AI632997, AI612885, |
| | | | | | AW198090, AA974049, AI446373, AL038779, AL046926, AI800433, |
| | | | | | AA640779, AW163464, AI349645, AI817244, AI567935, AI636588, |
| | | | | | AL036274, AI345587, AW162071, AI434468, AW151485, AW129659, |
| | | | | | AI312428, Y11587, I48979, I48978, AF090900, I89947, AF078844, A08916, |
| | | | | | A08913, AF113019, AL110196, AF090903, AL117460, AF113677, |
| | | | | | AR011880, X84990, I89931, AL050393, AL133640, AF177401, 149625, |
| | | | | | AL049314, AL133080, E02349, AF111851, AL049466, AF113689, |
| | | | | | AL117457, AL050116, AF090934, A08910, AL050149, AL080060, |
| | | | | | AF090901, X82434, AL110221, AF118070, AL122121, Y16645, S78214, |
| | | | | | AL133075, AF106862, E07361, Y11254, AL133560, AL117585, AL133565, |
| | | | | | A65341, AF017152, AL096744, AL117394, AF079765, AF113690, |
| | | | | | AL080124, AL137550, AF125948, AF104032, AJ000937, AL122050, |
| | | | | | AF113699, AF125949, S68736, AL050138, AF091084, AL122123, |
| | | | | | AL137459, AF183393, AL133016, AF158248, AL050108, U42766, |
| | | | | | AL133093, AF113013, AR059958, AF113676, AL122093, X63574, E07108, |
| | | | | | AF090896, AL050277, AL137557, AB019565, E03348, AF113691, L31396, |
| | | | | | AL117435, L31397, AF113694, AL117583, Z82022, AL110225, AL049452, |
| | | | | | AF090943, AL049382, AL137527, AF017437, AL122049, AL049938, |
| | | | | | AJ242859, AL049464, A58524, A58523, AJ238278, AL133557, AL050146, |
| | | | | | AF146568, AL133606, A93016, AF118064, AL080137, A08909, AL137283, |
| | | | | | AL049300, A77033, A77035, I33392, AF118094, U35846, U91329, |
| | | | | | AL137271, AL133113, AI2297, X72889, U00763, AL122098, AL049430, |
| | | | | | AL122110, AL049283, A08912, AL137538, A03736, AF097996, AL050024, |
| | | | | | I03321, AL137463, U80742, AL080127, X93495, AL137648, X70685, |
| | | | | | AF087943, X96540, U72620, X65873, AJ012755, AL080159, AL133072, |
| | | | | | AL110197, AF111112, I09360, X98834, A93350, AL137521, AF067728, |
| | | | | | E08263, E08264, U67958, I42402, AF061943, AL137560, AL133568, |
| | | | | | I26207, AF119337, AL133077, AC006336, AL137523, AL080074, E15569, |
| | | | | | AR038969, E05822, AF079763, AF026124, AF026816, AL110280, |
| | | | | | AR054984, AF153205, AC004200, AL133014, AC006371, X83508, |
| | | | | | AR000496, U39656, Y09972, Y14314, I00734, U77594, AL050172, |
| | | | | | AF000145, E00617, E00717, E00778, A08911, Z37987, U96683, AL137533, |
| | | | | | S61953, Z72491, AF003737, AR038854, E04233, I66342, AF185576, |
| | | | | | Y07905, AL137480, AL133104, AL122111, AL133098, AF106657, |
| | | | | | AF057300, AF057299, AL137476, AF162270, AL137556, AL137526, |
| | | | | | AF106827, AF100931, M30514, I17767, A07647, A45787, U78525, |
| | | | | | AJ006417, AL133067, AF095901, AC004686, AC006840, AL137488, |
| | | | | | AF118090, L30117, AL137478, AL035587, U58996, AL117440, AL137292, |
| | | | | | AC007298, AF132676, AF061836, AF111849, U68387, AC004987, |
| | | | | | AL117432, AL031346, E08631, AR013797, and AL137429. |
| HCQDE22 | 77 | 949991 | 1-733 | 15-747 | AA677543, N58518, AA699859, and AC006556. |
| HCQDA13 | 78 | 908299 | 1 -435 | 15 -449 | H77767, R89164, AA995737, AF235095, AF235095, AC013608, AC013608, |
| | | | | | AC013608, AP001574, and AP001574. |
| HCQCQ76 | 79 | 953491 | 1-816 | 15-830 | AA418408, AW237234, N45214, AI081797, AW293817, AA927507, |
| | | | | | AC010622, AC010622, AC027326, and AC027326. |
| HCQAC71 | 80 | 951844 | 1-483 | 15-497 | AA401242, AI609152, AI078381, AAI02778, AI198283, AI077572, |
| | | | | | AI694848, AI201085, AA215665, AA978209, AA446587, AA114156, |
| | | | | | AW016425, AI818924, AI277223, Z24841, AAI30708, AA577072, |
| | | | | | AW025780, AI356291, AA190801, AI671975, AI923123, F35734, R44726, |
| | | | | | F26140, T16749, AA761079, AI991909, AI581346, AI382586, AI919306, |
| | | | | | AI557129, AC007338, AC007338, AC018845, and AC018845. |
| HCLHE01 | 81 | 914341 | 1-650 | 15-664 | AA576288, N31211, N21276, AA669338, R01545, AC015936, and |
| | | | | | AC015936. |
| H2LAM15 | 82 | 767606 | 1-895 | 15-909 | AA722878, AW070839, AA503095, AA889316, AA628716, AI336154, |
| | | | | | AI911886, AA918399, N89745, AI268726, AA613950, W17236, AA910620, |
| | | | | | AA626250, T97465, AA923090, AI216561, T97464, H05962, AA707375, |
| | | | | | T96140, AA314130, AI688102, AW083237, AA037564, AA722828, |
| | | | | | AI219608, R15087, AA345081, AI675972, AA932792, AA503524, T96222, |
| | | | | | AI522074, AI923674, AI338611, AA037485, AW380840, AI581541, |
| | | | | | N30008, AA445929, AA843974, N89900, AA776102, AA314811, |
| | | | | | AA385260, W19454, AW002151, AA806039, AI870575, AA890143, |
| | | | | | AC005971, AC005971, AC005971, AL356460, and AL356460. |
| H2CBP41 | 83 | 923006 | 1-503 | 15-517 | AA307889, AA054296, W96510, AI346035, W93642, AA502752, AI130754, |
| | | | | | AA770166, AA778512, AW024473, AI056264, AW024828, T87078, |
| | | | | | AA677316, H71308, AI741867, AA034248, AI580789, AW009144, |
| | | | | | AA854351, AI452752, AW024484, AI090276, AI290993, AI857696, |
| | | | | | AI719339, AI338292, W92826, AI091503, AA460398, F26472, W16886, |
| | | | | | F36965, T87077, AI024756, AI291319, AA026293, AA814858, AA812735, |
| | | | | | AI051900, AI127750, W38862, AI076382, AA778103, AA609966, |
| | | | | | AI122824, AA074957, AI077896, AA848104, AA782993, AA205010, |
| | | | | | AI289262, AA482670, AA461350, AA026292, AI245497, AI436341, |
| | | | | | AI278737, AI283744, W93295, AA075112, T97653, AA782956, AI707753, |
| | | | | | AA718912, AW337132, AA628645, AA628261, W93902, AA873209, |
| | | | | | AA460335, H70902, AA058474, AI282039, AI758943, AA448793, F37629, |
| | | | | | N89690, AA461175, AA629835, AI567067, AI219583, T97654, AA095949, |
| | | | | | AA164705, AI805468, AA093482, AI880308, W96477, N54735, AA629883, |
| | | | | | AA629896, AA757035, AI217200, AA585304, AC021329, AC021329, |
| | | | | | AC027116, and AC027116. |

[0086] TABLE 4

| | | | | Cell | | |
|---|---|---|---|---|---|---|
| Code | Description | Tissue | Organ | Line | Disease | Vector |
| AR022 | a_Heart | a_Heart | | | | |
| AR023 | a_Liver | a_Liver | | | | |
| AR024 | a_mammary gland | a_mammary gland | | | | |
| AR025 | a_Prostate | a_Prostate | | | | |
| AR026 | a_small intestine | a_small intestine | | | | |
| AR027 | a_Stomach | a_Stomach | | | | |
| AR028 | Blood B cells | Blood B cells | | | | |
| AR029 | Blood B cells activated | Blood B cells | | | | |
| | | activated | | | | |
| AR030 | Blood B cells resting | Blood B cells | | | | |
| | | resting | | | | |
| AR031 | Blood T cells activated | Blood T cells | | | | |
| | | activated | | | | |
| AR032 | Blood T cells resting | Blood T cells | | | | |
| | | resting | | | | |
| AR033 | brain | brain | | | | |
| AR034 | breast | breast | | | | |
| AR035 | breast cancer | breast cancer | | | | |
| AR036 | Cell Line CAOV3 | Cell Line CAOV3 | | | | |
| AR037 | cell line PA-1 | cell line PA-1 | | | | |
| AR038 | cell line transformed | cell line transformed | | | | |
| AR039 | colon | colon | | | | |
| AR040 | colon (9808co65R) | colon (9808co65R) | | | | |
| AR041 | colon (9809co15) | colon (9809co15) | | | | |
| AR042 | colon cancer | colon cancer | | | | |
| AR043 | colon cancer | colon cancer | | | | |
| | (9808co64R) | (9808co64R) | | | | |
| AR044 | colon cancer 9809co14 | colon cancer | | | | |
| | | 9809co14 | | | | |
| AR045 | corn clone 5 | corn clone 5 | | | | |
| AR046 | corn clone 6 | corn clone 6 | | | | |
| AR047 | corn clone 2 | corn clone 2 | | | | |
| AR048 | corn clone 3 | corn clone 3 | | | | |
| AR049 | Corn Clone 4 | Corn Clone 4 | | | | |
| AR050 | Donor II B Cells 24 hrs | Donor II B Cells 24 hrs | | | | |
| AR051 | Donor II B Cells 72 hrs | Donor II B Cells 72 hrs | | | | |
| AR052 | Donor II B-Cells 24 hrs. | Donor II B-Cells 24 hrs. | | | | |
| AR053 | Donor II B-Cells 72 hrs | Donor II B-Cells | | | | |
| AR054 | Donor II Resting B Cells | Donor II Resting B Cells | | | | |
| AR055 | Heart | Heart | | | | |
| AR056 | Human Lung | Human Lung | | | | |
| | (clonetech) | (clonetech) | | | | |
| AR057 | Human Mammary | Human Mammary | | | | |
| | (clontech) | (clontech) | | | | |
| AR058 | Human Thymus | Human Thymus | | | | |
| | (clonetech) | (clonetech) | | | | |
| AR059 | Jurkat (unstimulated) | Jurkat (unstimulated) | | | | |
| AR060 | Kidney | Kidney | | | | |
| AR061 | Liver | Liver | | | | |
| AR062 | Liver (Clontech) | Liver (Clontech) | | | | |
| AR063 | Lymphocytes chronic | Lymphocytes chronic | | | | |
| | lymphocytic leukaemia | lymphocytic leukaemia | | | | |
| AR064 | Lymphocytes diffuse | Lymphocytes diffuse | | | | |
| | large B cell lymphoma | large B cell lymphoma | | | | |
| AR065 | Lymphocytes follicular | Lymphocytes follicular | | | | |
| | lymphoma | lymphoma | | | | |
| AR066 | normal breast | normal breast | | | | |
| AR067 | Normal Ovarian | Normal Ovarian | | | | |
| | (4004901) | (4004901) | | | | |
| AR068 | Normal Ovary | Normal Ovary | | | | |
| | 9508G045 | 9508G045 | | | | |
| AR069 | Normal Ovary | Normal Ovary | | | | |
| | 9701G208 | 9701G208 | | | | |
| AR070 | Normal Ovary | Normal Ovary | | | | |
| | 9806G005 | 9806G005 | | | | |
| AR071 | Ovarian Cancer | Ovarian Cancer | | | | |
| AR072 | Ovarian Cancer | Ovarian Cancer | | | | |
| | (9702G001) | (9702G001) | | | | |
| AR073 | Ovarian Cancer | Ovarian Cancer | | | | |
| | (9707G029) (9707G029) | | | | | |
| AR074 | Ovarian Cancer | Ovarian Cancer | | | | |
| | (9804G011) | (9804G011) | | | | |
| AR075 | Ovarian Cancer | Ovarian Cancer | | | | |
| | (9806G019) | (9806G019) | | | | |
| AR076 | Ovarian Cancer | Ovarian Cancer | | | | |
| | (9807G017) | (9807G017) | | | | |
| AR077 | Ovarian Cancer | Ovarian Cancer | | | | |
| | (9809G001) | (9809G001) | | | | |
| AR078 | ovarian cancer 15799 | ovarian cancer 15799 | | | | |
| AR079 | Ovarian Cancer | Ovarian Cancer | | | | |
| | 17717AID | 17717AID | | | | |
| AR080 | Ovarian Cancer | Ovarian Cancer | | | | |
| | 4004664B1 | 4004664B1 | | | | |
| AR081 | Ovarian Cancer | Ovarian Cancer | | | | |
| | 4005315A1 | 4005315A1 | | | | |
| AR082 | ovarian cancer | ovarian cancer | | | | |
| | 94127303 | 94127303 | | | | |
| AR083 | Ovarian Cancer | Ovarian Cancer | | | | |
| | 96069304 | 96069304 | | | | |
| AR084 | Ovarian Cancer | Ovarian Cancer | | | | |
| | 9707G029 | 9707G029 | | | | |
| AR085 | Ovarian Cancer | Ovarian Cancer | | | | |
| | 9807G045 | 9807G045 | | | | |
| AR086 | ovarian cancer | ovarian cancer | | | | |
| | 9809G001 | 9809G001 | | | | |
| AR087 | Ovarian Cancer | Ovarian Cancer | | | | |
| | 9905C032RC | 9905C032RC | | | | |
| AR088 | Ovarian cancer | Ovarian cancer | | | | |
| | 9907 C00 3rd | 9907 C00 3rd | | | | |
| AR089 | Prostate | Prostate | | | | |
| AR090 | Prostate (clonetech) | Prostate (clonetech) | | | | |
| AR091 | prostate cancer | prostate cancer | | | | |
| AR092 | prostate cancer #15176 | prostate cancer #15176 | | | | |
| AR093 | prostate cancer #15509 | prostate cancer #15509 | | | | |
| AR094 | prostate cancer #15673 | prostate cancer #15673 | | | | |
| AR095 | Small Intestine | Small Intestine | | | | |
| | (Clontech) | (Clontech) | | | | |
| AR096 | Spleen | Spleen | | | | |
| AR097 | Thymus T cells | Thymus T cells | | | | |
| | activated | activated | | | | |
| AR098 | Thymus T cells resting | Thymus T cells resting | | | | |
| AR099 | Tonsil | Tonsil | | | | |
| AR100 | Tonsil geminal center | Tonsil geminal center | | | | |
| | centroblast | centroblast | | | | |
| AR101 | Tonsil germinal center | Tonsil germinal center | | | | |
| | B cell | B cell | | | | |
| AR102 | Tonsil lymph node | Tonsil lymph node | | | | |
| AR103 | Tonsil memory B cell | Tonsil memory B cell | | | | |
| AR104 | Whole Brain | Whole Brain | | | | |
| AR105 | Xenograft ES-2 | Xenograft ES-2 | | | | |
| AR106 | Xenograft SW626 | Xenograft SW626 | | | | |
| H0205 | Human Colon Cancer, | Human Colon Cancer | Colon | | | pBluescript |
| | differential | | | | | |
| H0263 | human colon cancer | Human Colon Cancer | Colon | | disease | Lambda |
| | | | | | ZAP II | |
| H0596 | Human Colon | Human Colon Cancer | Colon | | | Lambda |
| | Cancer; re-excision | | | | | ZAP II |
| H0676 | Colon, Cancer | Colon Cancer | | | | pCMVSport3.0 |
| | (9808C064R)-total RNA | 9808C064R | | | | |
| S0356 | Colon Carcinoma | Colon Carcinoma | Colon | | disease | pSport1 |
| S0360 | Colon Tumor II | Colon Tumor | Colon | | disease | pSport1 |
| S0376 | Colon Tumor | Colon Tumor | | | disease | pSport1 |
| T0110 | Human colon carcinoma | | | | | pBluescript |
| | (HCC) cell line, remake | | | | | SK- |
| T0114 | Human (Caco-2) cell | | | | | pBluescript |
| | line, adenocarcinoma, | | | | | SK- |
| | colon, remake | | | | | |
| T0115 | Human Colon Carcinoma | | | | | pBluescript |
| | (HCC) cell line | | | | | SK- |
| L0021 | Human adult (K. Okubo) | | | | | |
| L0369 | NCI_CGAP_AA1 | adrenal adenoma | adrenal | | | Bluescript |
| | | | gland | | | SK- |
| L0371 | NCI_CGAP_Br3 | breast tumor | breast | | | Bluescript |
| | | | | | | SK- |
| L0438 | normalized infant brain | total brain | brain | | | lafmid BA |
| | cDNA | | | | | |
| L0439 | Soares infant brain | | whole brain | | | Lafmid BA |
| | 1NIB | | | | | |
| L0517 | NCI_CGAP_Pr1 | | | | | pAMP10 |
| L0521 | NCI_CGAP_Ew1 | Ewing's sarcoma | | | | pAMP10 |
| L0527 | NCI_CGAP_Ov2 | ovary | | | | pAMP10 |
| L0608 | Stratagene lung | lung carcinoma | lung | NCI-H69 | | pBluescript |
| | carcinoma 937218 | | | | | SK- |
| L0655 | NCI_CGAP_Lym12 | lymphoma, follicular | lymph node | | | pCMV- |
| | | mixed small and large | | | | SPORT6 |
| | | cell | | | | |
| L0658 | NCI_CGAP_Ov35 | tumor, 5 pooled | ovary | | | pCMV- |
| | | (see description) | | | | SPORT6 |
| L0665 | NCI_CGAP_Ut4 | serous papillary | uterus | | | pCMV- |
| | | carcinoma, high | | | | SPORT6 |
| | | grade. 2 pooled t | | | | |
| L0666 | NCI_CGAP_Ut1 | well-differentiated | uterus | | | pCMV- |
| | | endometrial | | | | SPORT6 |
| | | adenocarcinoma, 7 | | | | |
| L0717 | Gessler Wilms tumor | | | | | pSPORT1 |
| L0731 | Soares_pregnant_uterus_NbHPU | | uterus | | | pT7T3-Pac |
| L0740 | Soares melanocyte 2NbHM | melanocyte | | | | pT7T3D |
| | | | | | | (Pharmacia) |
| | | | | | | with a modified |
| | | | | | | polylinker |
| L0743 | Soares breast 2NbHBst | | breast | | | pT7T3D |
| | | | | | | (Pharmacia) |
| | | | | | | with a modified |
| | | | | | | polylinker |
| L0745 | Soares retina N2b4HR | retina | eye | | | pT7T3D |
| | | | | | | (Pharmacia) |
| | | | | | | with a modified |
| | | | | | | polylinker |
| L0747 | Soares_fetal_heart_NbH | | heart | | | pT7T3D |
| | H19W | | | | | (Pharmacia) |
| | | | | | | with a modified |
| | | | | | | polylinker |
| L0748 | Soares fetal liver spleen | | Liver and | | | pT7T3D |
| | 1NFLS | | Spleen | | | (Pharmacia) |
| | | | | | | with a modified |
| | | | | | | polylinker |
| L0749 | Soares_fetal_liver_spleen_1NFLS_S1 | | Liver and | | | pT7T3D |
| | | | Spleen | | | (Pharmacia) |
| | | | | | | with a modified |
| | | | | | | polylinker |
| L0750 | Soares_fetal_lung_NbH | | lung | | | pT7T3D |
| | H19W | | | | | (Pharmacia) |
| | | | | | | with a modified |
| | | | | | | polylinker |
| L0752 | Soares_parathyroid_tumor_NbHPA | parathyroid tumor | parathyroid | | | pT7T3D |
| | | | gland | | | (Pharmacia) |
| | | | | | | with a modified |
| | | | | | | polylinker |
| L0754 | Soares placenta Nb2HP | | placenta | | | pT7T3D |
| | | | | | | (Pharmacia) |
| | | | | | | with a modified |
| | | | | | | polylinker |
| L0755 | Soares_placenta_8to9weeks_2NbHP8to9W | | placenta | | | pT7T3D |
| | | | | | | (Pharmacia) |
| | | | | | | with a modified |
| | | | | | | polylinker |
| L0756 | Soares_multiple_sclerosis_2NbHMSP | multiple sclerosis | | | | pT7T3D |
| | | lesions | | | | (Pharmacia) |
| | | | | | | with a modified |
| | | | | | | polylinker |
| | | | | | | V_TYPE |
| L0757 | Soares_senescent_fibroblasts_NbHSF | senescent fibroblast | | | | pT7T3D |
| | | | | | | (Pharmacia) |
| | | | | | | with a modified |
| | | | | | | polylinker |
| | | | | | | V_TYPE |
| L0758 | Soares_testis_NHT | | | | | pT7T3D- |
| | | | | | | Pac (Pharmacia) |
| | | | | | | with a modified |
| | | | | | | polylinker |
| L0759 | Soares_total_fetus_Nb2HF8_9w | | | | | pT7T3D- |
| | | | | | | Pac (Pharmacia) |
| | | | | | | with a modified |
| | | | | | | polylinker |
| L0763 | NCI_CGAP_Br2 | breast | | | | pT7T3D- |
| | | | | | | Pac (Pharmacia) |
| | | | | | | with a modified |
| | | | | | | polylinker |
| L0766 | NCI_CGAP_GCB1 | germinal center B | | | | pT7T3D- |
| | | cell | | | | Pac (Pharmacia) |
| | | | | | | with a modified |
| | | | | | | polylinker |
| L0768 | NCI_CGAP_GC4 | pooled germ cell | | | | pT7IT3D- |
| | | tumors | | | | Pac (Pharmacia) |
| | | | | | | with a modified |
| | | | | | | polylinker |
| L0769 | NCI_CGAP_Brn25 | anaplastic | brain | | | pT7T3D- |
| | | oligodendroglioma | | | | Pac (Pharmacia) |
| | | | | | | with a modified |
| | | | | | | polylinker |
| L0771 | NCI_CGAP_Co8 | adenocarcinoma | colon | | | pT7T3D- |
| | | | | | | Pac (Pharmacia) |
| | | | | | | with a modified |
| | | | | | | polylinker |
| L0772 | NCI_CGAP_Co10 | colon tumor RER+ | colon | | | pT7T3D- |
| | | | | | | Pac (Pharmacia) |
| | | | | | | with a modified |
| | | | | | | polylinker |
| L0774 | NCI_CGAP_Kid3 | | kidney | | | pT7T3D- |
| | | | | | | Pac (Pharmacia) |
| | | | | | | with a modified |
| | | | | | | polylinker |
| L0775 | NIC_CGAP_Kid5 | 2 pooled tumors | kidney | | | pT7T3D- |
| | | (clear cell type) | | | | Pac (Pharmacia) |
| | | | | | | with a modified |
| | | | | | | polylinker |
| L0776 | NCI_CGAP_Lu5 | carcinoid | lung | | | pT7T3D- |
| | | | | | | Pac (Pharmacia) |
| | | | | | | with a modified |
| | | | | | | polylinker |
| L0777 | Soares_NhHMPu_S1 | Pooled human | mixed (see | | | pT7T3D- |
| | | melanocyte, fetal | below) | | | Pac (Pharmacia) |
| | | heart, and pregnant | | | | with a modified |
| | | | | | | polylinker |
| L0779 | Soares_NFL_T_GBC_S1 | | pooled | | | pT7T3D- |
| | | | | | | Pac (Pharmacia) |
| | | | | | | with a modified |
| | | | | | | polylinker |
| L0786 | Soares_NbHFB | | whole brain | | | pT7T3D- |
| | | | | | | Pac (Pharmacia) |
| | | | | | | with a modified |
| | | | | | | polylinker |
| L0794 | NCI_CGAP_GC6 | pooled germ cell | | | | pT7T3D- |
| | | tumors | | | | Pac (Pharmacia) |
| | | | | | | with a modified |
| | | | | | | polylinker |
| L0803 | NCI_CGAP_Kid11 | | kidney | | | pT7T3D- |
| | | | | | | Pac (Pharmacia) |
| | | | | | | with a modified |
| | | | | | | polylinker |
| L0805 | NCI_CGAP_Lu24 | carcinoid | lung | | | pT7T3D- |
| | | | | | | Pac (Pharmacia) |
| | | | | | | with a modified |
| | | | | | | polylinker |

[0087] TABLE 5

| OMIM | |
|---|---|
| Reference | Description |
| 107776 | Colton blood group, 110450 |
| 109690 | Asthma, nocturnal, susceptibility to |
| 109690 | Obesity, susceptibility to |
| 121050 | Contractural arachnodactyly, congenital |
| 131400 | Eosinophilia, familial |
| 134934 | Thanatophoric dysplasia, types I and II, 187600 |
| 134934 | Achondroplasia, 100800 |
| 134934 | Craniosynostosis, nonsyndromic |
| 134934 | Crouzon syndrome with acanthosis nigricans |
| 134934 | Hypochondroplasia, 146000 |
| 138040 | Cortisol resistance |
| 138079 | Hyperinsulinism, familial, 602485 |
| 138079 | MODY, type 2, 125851 |
| 139191 | Growth hormone deficient dwarfism |
| 142959 | Hand-foot-uterus syndrome, 140000 |
| 143100 | Huntington disease |
| 153455 | Cutis laxa, recessive, type I, 219100 |
| 153880 | Macular dystrophy, dominant cystoid |
| 154500 | Treacher Collins mandibulofacial dysostosis |
| 159000 | Muscular dystrophy, limb-girdle, type 1A |
| 179095 | Male infertility |
| 180071 | Retinitis pigmentosa, autosomal recessive |
| 180072 | Night blindness, congenital stationary, type 3, 163500 |
| 180072 | Retinitis pigmentosa, autosomal recessive |
| 180104 | Retinitis pigmentosa-9 |
| 181460 | Schistosoma mansoni, susceptibility/resistance to |
| 192974 | Neonatal alloimmune thrombocytopenia |
| 192974 | Glycoprotein Ia deficiency |
| 194190 | Wolf-Hirschhorn syndrome |
| 203740 | Alpha-ketoglutarate dehydrogenase deficiency |
| 222600 | Atelosteogenesis II, 256050 |
| 222600 | Achondrogenesis Ib, 600972 |
| 222600 | Diastrophic dysplasia |
| 234000 | Factor XII deficiency |
| 252800 | Mucopolysaccharidosis Ih |
| 252800 | Mucopolysaccharidosis Ih/s |
| 252800 | Mucopolysaccharidosis Is |
| 272750 | GM2-gangliosidosis, AB variant |
| 600807 | Bronchial asthma |
| 600965 | Deafness, autosomal dominant 6 |
| 600994 | Deafness, autosomal dominant 5 |
| 601411 | Muscular dystrophy, limb-girdle, type 2F, 601287 |
| 601472 | Charcot-Marie-Tooth neuropathy-2D |
| 601596 | Charcot-Marie-Tooth neuropathy, demyelinating |
| 601649 | Blepharophimosis, epicanthus inversus, and ptosis, type 2 |
| 601692 | Reis-Bucklers comeal dystrophy |
| 601692 | Corneal dystrophy, Avellino type |
| 601692 | Corneal dystrophy, Groenouw type I, 121900 |
| 601692 | Corneal dystrophy, lattice type I, 122200 |
| 602089 | Hemangioma, capillary, hereditary |
| 602121 | Deafness, autosomal dominant nonsyndromic sensorineural, 1, |
| | 124900 |
| 602460 | Deafness, autosomal dominant 15, 602459 |

[0088] Polynucleotide and Polypeptide Variants

[0089] The present invention is also directed to variants of the colorectal cancer associated polynucleotide sequence disclosed in SEQ ID NO:X or the complementary strand thereto, nucleotide sequences encoding the polypeptide of SEQ ID NO:Y, the nucleotide sequence of SEQ ID NO:X encoding the polypeptide sequence as defined in column 6 of Table 1A, nucleotide sequences encoding the polypeptide as defined in column 6 of Table 1A, the nucleotide sequence as defined in columns 8 and 9 of Table 2, nucleotide sequences encoding the polypeptide encoded by the nucleotide sequence as defined in columns 8 and 9 of Table 2, the nucleotide sequence as defined in column 6 of Table 1B, nucleotide sequences encoding the polypeptide encoded by the nucleotide sequence as defined in column 6 of Table 1B, the cDNA sequence contained in Clone ID NO:Z, and/or nucleotide sequences encoding a polypeptide encoded by the cDNA sequence contained in Clone ID NO:Z.

[0090] The present invention also encompasses variants of the polypeptide sequence disclosed in SEQ ID NO:Y, a polypeptide sequence as defined in column 6 of Table 1A, a polypeptide sequence encoded by the polynucleotide sequence in SEQ ID NO:X, a polypeptide sequence encoded by the nucleotide sequence as defined in columns 8 and 9 of Table 2, a polypeptide sequence encoded by the nucleotide sequence as defined in column 6 of Table 1B, a polypeptide sequence encoded by the complement of the polynucleotide sequence in SEQ ID NO:X, and/or a polypeptide sequence encoded by the cDNA sequence contained in Clone ID NO:Z.

[0091] “Variant” refers to a polynucleotide or polypeptide differing from the polynucleotide or polypeptide of the present invention, but retaining essential properties thereof. Generally, variants are overall closely similar, and, in many regions, identical to the polynucleotide or polypeptide of the present invention.

[0092] Thus, one aspect of the invention provides an isolated nucleic acid molecule comprising, or alternatively consisting of, a polynucleotide having a nucleotide sequence selected from the group consisting of: (a) a nucleotide sequence described in SEQ ID NO:X or contained in the cDNA sequence of Clone ID NO:Z; (b) a nucleotide sequence in SEQ ID NO:X or the cDNA in Clone ID NO:Z which encodes a mature colorectal cancer associated polypeptide; (c) a nucleotide sequence in SEQ ID NO:X or the cDNA sequence of Clone ID NO:Z, which encodes a biologically active fragment of a colorectal cancer associated polypeptide; (d) a nucleotide sequence in SEQ ID NO:X or the cDNA sequence of Clone ID NO:Z, which encodes an antigenic fragment of a colorectal cancer associated polypeptide; (e) a nucleotide sequence encoding a colorectal cancer associated polypeptide having the complete amino acid sequence of SEQ ID NO:Y or the complete amino acid sequence encoded by the cDNA in Clone ID NO:Z; (f) a nucleotide sequence encoding a mature colorectal cancer associated polypeptide of the amino acid sequence of SEQ ID NO:Y or the amino acid sequence encoded by the cDNA in Clone ID NO:Z; (g) a nucleotide sequence encoding a biologically active fragment of a colorectal cancer associated polypeptide having the complete amino acid sequence of SEQ ID NO:Y or the complete amino acid sequence encoded by the cDNA in Clone ID NO:Z; (h) a nucleotide sequence encoding an antigenic fragment of a colorectal cancer associated polypeptide having the complete amino acid sequence of SEQ ID NO:Y or the complete amino acid sequence encoded by the cDNA in Clone ID NO:Z; and (i) a nucleotide sequence complementary to any of the nucleotide sequences in (a), (b), (c), (d), (e), (f), (g), or (h), above.

[0093] The present invention is also directed to nucleic acid molecules which comprise, or alternatively consist of, a nucleotide sequence which is at least 80%, 85%, 90%, 95%, 96%, 97%, 98%, 99% or 100%, identical to, for example, any of the nucleotide sequences in (a), (b), (c), (d), (e), (f), (g), (h), or (i) above, the nucleotide coding sequence in SEQ ID NO:X or the complementary strand thereto, the nucleotide coding sequence of the cDNA contained in Clone ID NO:Z or the complementary strand thereto, a nucleotide sequence encoding the polypeptide of SEQ ID NO:Y, a nucleotide sequence encoding a polypeptide sequence encoded by the nucleotide sequence in SEQ ID NO:X, a polypeptide sequence encoded by the complement of the polynucleotide sequence in SEQ ID NO:X, a nucleotide sequence encoding the polypeptide encoded by the cDNA contained in Clone ID NO:Z, the nucleotide coding sequence in SEQ ID NO:X as defined in columns 8 and 9 of Table 2 or the complementary strand thereto, a. nucleotide sequence encoding the polypeptide encoded by the nucleotide sequence in SEQ ID NO:X as defined in columns 8 and 9 of Table 2 or the complementary strand thereto, the nucleotide coding sequence in SEQ ID NO:B as defined in column 6 of Table 1B or the complementary strand thereto, a nucleotide sequence encoding the polypeptide encoded by the nucleotide sequence in SEQ ID NO:B as defined in column 6 of Table 1B or the complementary strand thereto, the nucleotide sequence in SEQ ID NO:X encoding the polypeptide sequence as defined in column 6 of Table 1A or the complementary strand thereto, nucleotide sequences encoding a polypeptide as defined in column 6 of Table 1A or the complementary strand thereto, and/or polynucleotide fragments of any of these nucleic acid molecules (e.g., those fragments described herein). Polynucleotides which hybridize to the complement of these nucleic acid molecules under stringent hybridization conditions or alternatively, under lower stringency conditions, are also encompassed by the invention, as are polypeptides encoded by these polynucleotides and nucleic acids.

[0094] In a preferred embodiment, the invention encompasses nucleic acid molecules which comprise, or alternatively, consist of a polynucleotide which hybridizes under stringent hybridization conditions, or alternatively, under lower stringency conditions, to a polynucleotide in (a), (b), (c), (d), (e), (f), (g), (h), or (i) above, as are polypeptides encoded by these polynucleotides. In another preferred embodiment, polynucleotides which hybridize to the complement of these nucleic acid molecules under stringent hybridization conditions or alternatively, under lower stringency conditions, are also encompassed by the invention, as are polypeptides encoded by these polynucleotides.

[0095] In another embodiment, the invention provides a purified protein comprising, or alternatively consisting of, a polypeptide having an amino acid sequence selected from the group consisting of: (a) the complete amino acid sequence of SEQ ID NO:Y or the complete amino acid sequence encoded by the cDNA in Clone ID NO:Z; (b) the amino acid sequence of a mature colorectal cancer associated polypeptide having the amino acid sequence of SEQ ID NO:Y or the amino acid sequence encoded by the cDNA in Clone ID NO:Z; (c) the amino acid sequence of a biologically active fragment of a colorectal cancer associated polypeptide having the complete amino acid sequence of SEQ ID NO:Y or the complete amino acid sequence encoded by the cDNA in Clone ID NO:Z; and (d) the amino acid sequence of an antigenic fragment of a colorectal cancer associated polypeptide having the complete amino acid sequence of SEQ ID NO:Y or the complete amino acid sequence encoded by the cDNA in Clone ID NO:Z.

[0096] The present invention is also directed to proteins which comprise, or alternatively consist of, an amino acid sequence which is at least 80%, 85%, 90%, 95%, 96%, 97%, 98%, 99% or 100%, identical to, for example, any of the amino acid sequences in (a), (b), (c), or (d), above, the amino acid sequence shown in SEQ ID NO:Y, the amino acid sequence encoded by the cDNA contained in Clone ID NO:Z, the amino acid sequence of the polypeptide encoded by the nucleotide sequence in SEQ ID NO:X as defined in columns 8 and 9 of Table 2, the amino acid sequence of the polypeptide encoded by the nucleotide sequence in SEQ ID NO:B as defined in column 6 of Table 1B, the amino acid sequence as defined in column 6 of Table 1A, an amino acid sequence encoded by the nucleotide sequence in SEQ ID NO:X, and an amino acid sequence encoded by the complement of the polynucleotide sequence in SEQ ID NO:X. Fragments of these polypeptides are also provided (e.g., those fragments described herein). Further proteins encoded by polynucleotides which hybridize to the complement of the nucleic acid molecules encoding these amino acid sequences under stringent hybridization conditions or alternatively, under lower stringency conditions, are also encompassed by the invention, as are the polynucleotides encoding these proteins.

[0097] By a nucleic acid having a nucleotide sequence at least, for example, 95% “identical” to a reference nucleotide sequence of the present invention, it is intended that the nucleotide sequence of the nucleic acid is identical to the reference sequence except that the nucleotide sequence may include up to five point mutations per each 100 nucleotides of the reference nucleotide sequence encoding the polypeptide. In other words, to obtain a nucleic acid having a nucleotide sequence at least 95% identical to a reference nucleotide sequence, up to 5% of the nucleotides in the reference sequence may be deleted or substituted with another nucleotide, or a number of nucleotides up to 5% of the total nucleotides in the reference sequence may be inserted into the reference sequence. The query sequence may be an entire sequence referred to in Table 1A or 2 as the ORF (open reading frame), or any fragment specified, as described herein.

[0098] As a practical matter, whether any particular nucleic acid molecule or polypeptide is at least 80%, 85%, 90%, 95%, 96%, 97%, 98% or 99% identical to a nucleotide sequence of the present invention can be determined conventionally using known computer programs. A preferred method for determining the best overall match between a query sequence (a sequence of the present invention) and a subject sequence, also referred to as a global sequence alignment, can be determined using the FASTDB computer program based on the algorithm of Brutlag et al. (Comp. App. Biosci. 6:237-245 (1990)). In a sequence alignment the query and subject sequences are both DNA sequences. An RNA sequence can be compared by converting U's to T's. The result of said global sequence alignment is expressed as percent identity. Preferred parameters used in a FASTDB alignment of DNA sequences to calculate percent identity are: Matrix=Unitary, k-tuple=4, Mismatch Penalty=l, Joining Penalty=30, Randomization Group Length=0, Cutoff Score=l, Gap Penalty=5, Gap Size Penalty 0.05, Window Size=500 or the length of the subject nucleotide sequence, whichever is shorter.

[0099] If the subject sequence is shorter than the query sequence because of 5′ or 3′ deletions, not because of internal deletions, a manual correction must be made to the results. This is because the FASTDB program does not account for 5′ and 3′ truncations of the subject sequence when calculating percent identity. For subject sequences truncated at the 5′ or 3′ ends, relative to the query sequence, the percent identity is corrected by calculating the number of bases of the query sequence that are 5′ and 3′ of the subject sequence, which are not matched/aligned, as a percent of the total bases of the query sequence. Whether a nucleotide is matched/aligned is determined by results of the FASTDB sequence alignment. This percentage is then subtracted from the percent identity, calculated by the above FASTDB program using the specified parameters, to arrive at a final percent identity score. This corrected score is what is used for the purposes of the present invention. Only bases outside the 5′ and 3′ bases of the subject sequence, as displayed by the FASTDB alignment, which are not matched/aligned with the query sequence, are calculated for the purposes of manually adjusting the percent identity score.

[0100] For example, a 90 base subject sequence is aligned to a 100 base query sequence to determine percent identity. The deletions occur at the 5′ end of the subject sequence and therefore, the FASTDB alignment does not show a matched/alignment of the first 10 bases at 5′ end. The 10 unpaired bases represent 10% of the sequence (number of bases at the 5′ and 3′ ends not matched/total number of bases in the query sequence) so 10% is subtracted from the percent identity score calculated by the FASTDB program. If the remaining 90 bases were perfectly matched the final percent identity would be 90%. In another example, a 90 base subject sequence is compared with a 100 base query sequence. This time the deletions are internal deletions so that there are no bases on the 5′ or 3′ of the subject sequence which are not matched/aligned with the query. In this case the percent identity calculated by FASTDB is not manually corrected. Once again, only bases 5′ and 3′ of the subject sequence which are not matched/aligned with the query sequence are manually corrected for. No other manual corrections are to be made for the purposes of the present invention.

[0101] By a polypeptide having an amino acid sequence at least, for example, 95% “identical” to a query amino acid sequence of the present invention, it is intended that the amino acid sequence of the subject polypeptide is identical to the query sequence except that the subject polypeptide sequence may include up to five amino acid alterations per each 100 amino acids of the query amino acid sequence. In other words, to obtain a polypeptide having an amino acid sequence at least 95% identical to a query amino acid sequence, up to 5% of the amino acid residues in the subject sequence may be inserted, deleted, (indels) or substituted with another amino acid. These alterations of the reference sequence may occur at the amino or carboxy terminal positions of the reference amino acid sequence or anywhere between those terminal positions, interspersed either individually among residues in the reference sequence or in one or more contiguous groups within the reference sequence.

[0102] As a practical matter, whether any particular polypeptide is at least 80%, 85%, 90%, 95%, 96%, 97%, 98% or 99% identical to, for instance, the amino acid sequence of a polypeptide referred to in Table 1A (e.g., an amino acid sequence of the polypeptide identified in columns 5 or 6) or Table 2 (e.g., the amino acid sequence encoded by the polynucleotide sequence defined in columns 8 and 9 of Table 2),) or a fragment thereof, the amino acid sequence of the polypeptide encoded by the polynucleotide sequence in SEQ ID NO:B as defined in column 6 of Table 1B or a fragment thereof, the amino acid sequence of the polypeptide encoded by the nucleotide sequence in SEQ ID NO:X or a fragment thereof, or an amino acid sequence of the polypeptide encoded by cDNA contained in Clone ID NO:Z, or a fragment thereof, can be determined conventionally using known computer programs. A preferred method for determining the best overall match between a query sequence (a sequence of the present invention) and a subject sequence, also referred to as a global sequence alignment, can be determined using the FASTDB computer program based on the algorithm of Brutlag et al. (Comp. App. Biosci.6:237-245 (1990)). In a sequence alignment the query and subject sequences are either both nucleotide sequences or both amino acid sequences. The result of said global sequence alignment is expressed as percent identity. Preferred parameters used in a FASTDB amino acid alignment are: Matrix=PAM 0, k-tuple=2, Mismatch Penalty=1, Joining Penalty=20, Randomization Group Length=0, Cutoff Score=1, Window Size=sequence length, Gap Penalty=5, Gap Size Penalty=0.05, Window Size=500 or the length of the subject amino acid sequence, whichever is shorter.

[0103] If the subject sequence is shorter than the query sequence due to N- or C-terminal deletions, not because of internal deletions, a manual correction must be made to the results. This is because the FASTDB program does not account for N- and C-terminal truncations of the subject sequence when calculating global percent identity. For subject sequences truncated at the N- and C-termini, relative to the query sequence, the percent identity is corrected by calculating the number of residues of the query sequence that are N- and C-terminal of the subject sequence, which are not matched/aligned with a corresponding subject residue, as a percent of the total bases of the query sequence. Whether a residue is matched/aligned is determined by results of the FASTDB sequence alignment. This percentage is then subtracted from the percent identity, calculated by the above FASTDB program using the specified parameters, to arrive at a final percent identity score. This final percent identity score is what is used for the purposes of the present invention. Only residues to the N- and C-termini of the subject sequence, which are not matched/aligned with the query sequence, are considered for the purposes of manually adjusting the percent identity score. That is, only query residue positions outside the farthest N- and C-terminal residues of the subject sequence.

[0104] For example, a 90 amino acid residue subject sequence is aligned with a 100 residue query sequence to determine percent identity. The deletion occurs at the N-terminus of the subject sequence and therefore, the FASTDB alignment does not show a matching/alignment of the first 10 residues at the N-terminus. The 10 unpaired residues represent 10% of the sequence (number of residues at the N- and C-termini not matched/total number of residues in the query sequence) so 10% is subtracted from the percent identity score calculated by the FASTDB program. If the remaining 90 residues were perfectly matched the final percent identity would be 90%. In another example, a 90 residue subject sequence is compared with a 100 residue query sequence. This time the deletions are internal deletions so there are no residues at the N- or C-termini of the subject sequence which are not matched/aligned with the query. In this case the percent identity calculated by FASTDB is not manually corrected. Once again, only residue positions outside the N- and C-terminal ends of the subject sequence, as displayed in the FASTDB alignment, which are not matched/aligned with the query sequence are manually corrected for. No other manual corrections are to be made for the purposes of the present invention.

[0105] The polynucleotide variants of the invention may contain alterations in the coding regions, non-coding regions, or both. Especially preferred are polynucleotide variants containing alterations, which produce silent substitutions, additions, or deletions, but do not alter the properties or activities of the encoded polypeptide. Nucleotide variants produced by silent substitutions due to the degeneracy of the genetic code are preferred. Moreover, polypeptide variants in which less than 50, less than 40, less than 30, less than 20, less than 10, or 5-50, 5-25, 5-10, 1-5, or 1-2 amino acids are substituted, deleted, or added in any combination are also preferred. Polynucleotide variants can be produced for a variety of reasons, e.g., to optimize codon expression for a particular host (change codons in the human mRNA to those preferred by a bacterial host such as E. coli).

[0106] Naturally occurring variants are called “allelic variants,” and refer to one of several alternate forms of a gene occupying a given locus on a chromosome of an organism. (Genes II, Lewin, B., ed., John Wiley & Sons, New York (1985).) These allelic variants can vary at either the polynucleotide and/or polypeptide level and are included in the present invention. Alternatively, non-naturally occurring variants may be produced by mutagenesis techniques or by direct synthesis.

[0107] Using known methods of protein engineering and recombinant DNA technology, variants may be generated to improve or alter the characteristics of the polypeptides of the present invention. For instance, one or more amino acids can be deleted from the N-terminus or C-terminus of the polypeptides of the present invention without substantial loss of biological function. As an example, the authors of Ron et al., J. Biol. Chem. 268: 2984-2988 (1993), reported variant KGF proteins having heparin binding activity even after deleting 3, 8, or 27 amino-terminal amino acid residues. Similarly, Interferon gamma exhibited up to ten times higher activity after deleting 8-10 amino acid residues from the carboxy terminus of this protein. (Dobeli et al., J. Biotechnology 7:199-216 (1988).)

[0108] Moreover, ample evidence demonstrates that variants often retain a biological activity similar to that of the naturally occurring protein. For example, Gayle and coworkers (J. Biol. Chem. 268:22105-22111 (1993)) conducted extensive mutational analysis of human cytokine IL-1a. They used random mutagenesis to generate over 3,500 individual IL-1a mutants that averaged 2.5 amino acid changes per variant over the entire length of the molecule. Multiple mutations were examined at every possible amino acid position. The investigators found that “[m]ost of the molecule could be altered with little effect on either [binding or biological activity].” In fact, only 23 unique amino acid sequences, out of more than 3,500 nucleotide sequences examined, produced a protein that significantly differed in activity from wild-type.

[0109] Furthermore, even if deleting one or more amino acids from the N-terminus or C-terminus of a polypeptide results in modification or loss of one or more biological functions, other biological activities may still be retained. For example, the ability of a deletion variant to induce and/or to bind antibodies which recognize the secreted form will likely be retained when less than the majority of the residues of the secreted form are removed from the N-terminus or C-terminus. Whether a particular polypeptide lacking N- or C-terminal residues of a protein retains such immunogenic activities can readily be determined by routine methods described herein and otherwise known in the art.

[0110] Thus, the invention further includes polypeptide variants which show a functional activity (e.g., biological activity) of the polypeptides of the invention. Such variants include deletions, insertions, inversions, repeats, and substitutions selected according to general rules known in the art so as have little effect on activity.

[0111] The present application is directed to nucleic acid molecules at least 80%, 85%, 90%, 95%, 96%, 97%, 98%, 99% or 100% identical to the nucleic acid sequences disclosed herein, (e.g., encoding a polypeptide having the amino acid sequence of an N and/or C terminal deletion), irrespective of whether they encode a polypeptide having functional activity. This is because even where a particular nucleic acid molecule does not encode a polypeptide having functional activity, one of skill in the art would still know how to use the nucleic acid molecule, for instance, as a hybridization probe or a polymerase chain reaction (PCR) primer. Uses of the nucleic acid molecules of the present invention that do not encode a polypeptide having functional activity include, inter alia, (1) isolating a gene or allelic or splice variants thereof in a cDNA library; (2) in situ hybridization (e.g., “FISH”) to metaphase chromosomal spreads to provide precise chromosomal location of the gene, as described in Verma et al., Human Chromosomes: A Manual of Basic Techniques, Pergamon Press, New York (1988); (3) Northern Blot analysis for detecting mRNA expression in specific tissues (e.g., normal colorectal or diseased colorectal tissues); and (4) in situ hybridization (e.g., histochemistry) for detecting mRNA expression in specific tissues (e.g., normal colorectal or diseased colorectal tissues).

[0112] Preferred, however, are nucleic acid molecules having sequences at least 80%, 85%, 90%, 95%, 96%, 97%, 98%, 99% or 100% identical to the nucleic acid sequences disclosed herein, which do, in fact, encode a polypeptide having functional activity. By a polypeptide having “functional activity” is meant, a polypeptide capable of displaying one or more known functional activities associated with a full-length (complete) protein of the invention. Such functional activities include, but are not limited to, biological activity, antigenicity [ability to bind (or compete with a polypeptide of the invention for binding) to an anti-polypeptide of the invention antibody], immunogenicity (ability to generate antibody which binds to a specific polypeptide of the invention), ability to form multimers with polypeptides of the invention, and ability to bind to a receptor or ligand for a polypeptide of the invention.

[0113] The functional activity of the polypeptides, and fragments, variants and derivatives of the invention, can be assayed by various methods.

[0114] For example, in one embodiment where one is assaying for the ability to bind or compete with full-length polypeptide of the present invention for binding to an anti-polypeptide of the invention antibody, various immunoassays known in the art can be used, including but not limited to, competitive and non-competitive assay systems using techniques such as radioimmunoassays, ELISA (enzyme linked immunosorbent assay), “sandwich” immunoassays, immunoradiometric assays, gel diffusion precipitation reactions, immunodiffusion assays, in situ immunoassays (using colloidal gold, enzyme or radioisotope labels, for example), western blots, precipitation reactions, agglutination assays (e.g., gel agglutination assays, hemagglutination assays), complement fixation assays, immunofluorescence assays, protein A assays, and immunoelectrophoresis assays, etc. In one embodiment, antibody binding is detected by detecting a label on the primary antibody. In another embodiment, the primary antibody is detected by detecting binding of a secondary antibody or reagent to the primary antibody. In a further embodiment, the secondary antibody is labeled. Many means are known in the art for detecting binding in an immunoassay and are within the scope of the present invention.

[0115] In another embodiment, where a ligand is identified, or the ability of a polypeptide fragment, variant or derivative of the invention to multimerize is being evaluated, binding can be assayed, e.g., by means well-known in the art, such as, for example, reducing and non-reducing gel chromatography, protein affinity chromatography, and affinity blotting. See generally, Phizicky et al., Microbiol. Rev. 59:94-123 (1995). In another embodiment, the ability of physiological correlates of a polypeptide of the present invention to bind to a substrate(s) of the polypeptide of the invention can be routinely assayed using techniques known in the art.

[0116] In addition, assays described herein (see Examples) and otherwise known in the art may routinely be applied to measure the ability of polypeptides of the present invention and fragments, variants and derivatives thereof to elicit polypeptide related biological activity (either in vitro or in vivo). Other methods will be known to the skilled artisan and are within the scope of the invention.

[0117] Of course, due to the degeneracy of the genetic code, one of ordinary skill in the art will immediately recognize that a large number of the nucleic acid molecules having a sequence at least 80%, 85%, 90%, 95%, 96%, 97%, 98%, 99%, or 100% identical to, for example, the nucleic acid sequence of the cDNA contained in Clone ID NO:Z, a nucleic acid sequence referred to in Table 1A (e.g., SEQ ID NO:X), a nucleic acid sequence disclosed in Table 2 (e.g., the nucleic acid sequence delineated in columns 8 and 9) or fragments thereof, will encode polypeptides “having functional activity.” In fact, since degenerate variants of any of these nucleotide sequences all encode the same polypeptide, in many instances, this will be clear to the skilled artisan even without performing the above described comparison assay. It will be further recognized in the art that, for such nucleic acid molecules that are not degenerate variants, a reasonable number will also encode a polypeptide having functional activity. This is because the skilled artisan is fully aware of amino acid substitutions that are either less likely or not likely to significantly effect protein function (e.g., replacing one aliphatic amino acid with a second aliphatic amino acid), as further described below.

[0118] For example, guidance concerning how to make phenotypically silent amino acid substitutions is provided in Bowie et al., “Deciphering the Message in Protein Sequences: Tolerance to Amino Acid Substitutions,” Science 247:1306-1310 (1990), wherein the authors indicate that there are two main strategies for studying the tolerance of an amino acid sequence to change.

[0119] The first strategy exploits the tolerance of amino acid substitutions by natural selection during the process of evolution. By comparing amino acid sequences in different species, conserved amino acids can be identified. These conserved amino acids are likely important for protein function. In contrast, the amino acid positions where substitutions have been tolerated by natural selection indicates that these positions are not critical for protein function. Thus, positions tolerating amino acid substitution could be modified while still maintaining biological activity of the protein.

[0120] The second strategy uses genetic engineering to introduce amino acid changes at specific positions of a cloned gene to identify regions critical for protein function. For example, site directed mutagenesis or alanine-scanning mutagenesis (introduction of single alanine mutations at every residue in the molecule) can be used. See Cunningham et al., Science 244:1081-1085 (1989). The resulting mutant molecules can then be tested for biological activity.

[0121] As the authors state, these two strategies have revealed that proteins are surprisingly tolerant of amino acid substitutions. The authors further indicate which amino acid changes are likely to be permissive at certain amino acid positions in the protein. For example, most buried (within the tertiary structure of the protein) amino acid residues require nonpolar side chains, whereas few features of surface side chains are generally conserved. Moreover, tolerated conservative amino acid substitutions involve replacement of the aliphatic or hydrophobic amino acids Ala, Val, Leu and Ile; replacement of the hydroxyl residues Ser and Thr; replacement of the acidic residues Asp and Glu; replacement of the amide residues Asn and Gln, replacement of the basic residues Lys, Arg, and His; replacement of the aromatic residues Phe, Tyr, and Trp, and replacement of the small-sized amino acids Ala, Ser, Thr, Met, and Gly. Besides conservative amino acid substitutions, variants of the present invention include (i) substitutions with one or more of the non-conserved amino acid residues, where the substituted amino acid residues may or may not be one encoded by the genetic code, or (ii) substitutions with one or more of the amino acid residues having a substituent group, or (iii) fusion of the mature polypeptide with another compound, such as a compound to increase the stability and/or solubility of the polypeptide (for example, polyethylene glycol), or (iv) fusion of the polypeptide with additional amino acids, such as, for example, an IgG Fc fusion region peptide, serum albumin (preferably human serum albumin) or a fragment or variant thereof, or leader or secretory sequence, or a sequence facilitating purification. Such variant polypeptides are deemed to be within the scope of those skilled in the art from the teachings herein.

[0122] For example, polypeptide variants containing amino acid substitutions of charged amino acids with other charged or neutral amino acids may produce proteins with improved characteristics, such as less aggregation. Aggregation of pharmaceutical formulations both reduces activity and increases clearance due to the aggregate's immunogenic activity. See Pinckard et al., Clin. Exp. Immunol. 2:331-340 (1967); Robbins et al., Diabetes 36: 838-845 (1987); Cleland et al., Crit. Rev. Therapeutic Drug Carrier Systems 10:307-377 (1993).

[0123] A further embodiment of the invention relates to polypeptides which comprise the amino acid sequence of a polypeptide having an amino acid sequence which contains at least one amino acid substitution, but not more than 50 amino acid substitutions, even more preferably, not more than 40 amino acid substitutions, still more preferably, not more than 30 amino acid substitutions, and still even more preferably, not more than 20 amino acid substitutions from a polypeptide sequence disclosed herein. Of course it is highly preferable for a polypeptide to have an amino acid sequence which comprises the amino acid sequence of a polypeptide of SEQ ID NO:Y, an amino acid sequence encoded by SEQ ID NO:X, an amino acid sequence encoded by the portion of SEQ ID NO:X as defined in columns 8 and 9 of Table 2, an amino acid sequence encoded by the complement of SEQ ID NO:X, and/or the amino acid sequence encoded by cDNA contained in Clone ID NO:Z which contains, in order of ever-increasing preference, at least one, but not more than 10, 9, 8, 7, 6, 5, 4, 3, 2 or 1 amino acid substitutions.

[0124] In specific embodiments, the polypeptides of the invention comprise, or alternatively, consist of, fragments or variants of a reference amino acid sequence selected from: (a) the amino acid sequence of SEQ ID NO:Y or fragments thereof (e.g., the mature form and/or other fragments described herein); (b) the amino acid sequence encoded by SEQ ID NO:X or fragments thereof; (c) the amino acid sequence encoded by the complement of SEQ ID NO:X or fragments thereof; (d) the amino acid sequence encoded by the portion of SEQ ID NO:X as defined in columns 8 and 9 of Table 2 or fragments thereof; and (e) the amino acid sequence encoded by cDNA contained in Clone ID NO:Z or fragments thereof; wherein the fragments or variants have 1-5, 5-10, 5-25, 5-50, 10-50 or 50-150, amino acid residue additions, substitutions, and/or deletions when compared to the reference amino acid sequence. In preferred embodiments, the amino acid substitutions are conservative. Polynucleotides encoding these polypeptides are also encompassed by the invention.

[0125] Polynucleotide and Polypeptide Fragments

[0126] The present invention is also directed to polynucleotide fragments of the polynucleotides (nucleic acids) of the invention. In the present invention, a “polynucleotide fragment” refers to a polynucleotide having a nucleic acid sequence which, for example: is a portion of the cDNA contained in Clone ID NO:Z or the complementary strand thereto; is a portion of the polynucleotide sequence encoding the polypeptide encoded by the cDNA contained in Clone ID NO:Z or the complementary strand thereto; is a portion of a polynucleotide sequence encoding the amino acid sequence encoded by the region of SEQ ID NO:X as defined in columns 8 and 9 of Table 2 or the complementary strand thereto; is a portion of the polynucleotide sequence of SEQ ID NO:X as defined in columns 8 and 9 of Table 2 or the complementary strand thereto; is a portion of the polynucleotide sequence in SEQ ID NO:X or the complementary strand thereto; is a polynucleotide sequence encoding a portion of the polypeptide of SEQ ID NO:Y; is a polynucleotide sequence encoding a portion of a polypeptide encoded by SEQ ID NO:X; is a polynucleotide sequence encoding a portion of a polypeptide encoded by the complement of the polynucleotide sequence in SEQ ID NO:X; is a portion of a polynucleotide sequence encoding the amino acid sequence encoded by the region of SEQ ID NO:B as defined in column 6 of Table 1B or the complementary strand thereto; or is a portion of the polynucleotide sequence of SEQ ID NO:B as defined in column 6 of Table 1B or the complementary strand thereto.

[0127] The polynucleotide fragments of the invention are preferably at least about 15 nt, and more preferably at least about 20 nt, still more preferably at least about 30 nt, and even more preferably, at least about 40 nt, at least about 50 nt, at least about 75 nt, or at least about 150 nt in length. A fragment “at least 20 nt in length,” for example, is intended to include 20 or more contiguous bases from the cDNA sequence contained in Clone ID NO:Z, or the nucleotide sequence shown in SEQ ID NO:X or the complementary stand thereto. In this context “about” includes the particularly recited value or a value larger or smaller by several (5, 4, 3, 2, or 1) nucleotides, at either terminus or at both termini. These nucleotide fragments have uses that include, but are not limited to, as diagnostic probes and primers as discussed herein. Of course, larger fragments (e.g., at least 160, 170, 180, 190, 200, 250, 500, 600, 1000, or 2000 nucleotides in length) are also encompassed by the invention.

[0128] Moreover, representative examples of polynucleotide fragments of the invention, comprise, or alternatively consist of, a sequence from about nucleotide number 1-50, 51-100, 101-150, 151-200, 201-250, 251-300, 301-350, 351-400, 401- 450, 451-500, 501-550, 551-600, 651-700, 701-750, 751-800, 800-850, 851-900, 901- 950, 951-1000, 1001-1050, 1051-1100, 1101-1150, 1151-1200, 1201-1250, 1251- 1300, 1301-1350, 1351-1400, 1401-1450, 1451-1500, 1501-1550, 1551-1600, 1601- 1650, 1651-1700, 1701-1750, 1751-1800, 1801-1850, 1851-1900, 1901-1950, 1951- 2000, 2001-2050, 2051-2100, 2101-2150, 2151-2200, 2201-2250, 2251-2300, 2301- 2350, 2351-2400, 2401-2450, 2451-2500, 2501-2550, 2551-2600, 2601-2650, 2651- 2700, 2701-2750, 2751-2800, 2801-2850, 2851-2900, 2901-2950, 2951-3000, 3001- 3050, 3051-3100, 3101-3150, 3151-3200, 3201-3250, 3251-3300, 3301-3350, 3351- 3400, 3401-3450, 3451-3500, 3501-3550, 3551-3600, 3601-3650, 3651-3700, 3701- 3750, 3751-3800, 3801-3850, 3851-3900, 3901-3950, 3951-4000, 4001-4050, 4051- 4100, 4101-4150, 4151-4200, 4201-4250, 4251-4300, 4301-4350, 4351-4400, 4401- 4450, 4451-4500, 4501-4550, 4551-4600, 4601-4650, 4651-4700, 4701-4750, 4751- 4800, 4801-4850, 4851-4900, 4901-4950, 4951-5000, 5001-5050, 5051-5100, 5101- 5150, 5151-5200, 5201-5250, 5251-5300, 5301-5350, 5351-5400, 5401-5450, 5451- 5500, 5501-5550, 5551-5600, 5601-5650, 5651-5700, 5701-5750, 5751-5800, 5801- 5850, 5851-5900, 5901-5950, 5951-6000, 6001-6050, 6051-6100, 6101-6150, 6151- 6200, 6201-6250, 6251-6300, 6301-6350, 6351-6400, 6401-6450, 6451-6500, 6501- 6550, 6551-6600, 6601-6650, 6651-6700, 6701-6750, 6751-6800, 6801-6850, 6851- 6900, 6901-6950, 6951-7000, 7001-7050, 7051-7100, 7101-7150, 7151-7200, 7201- 7250, 7251-7300 or 7301 to the end of SEQ ID NO:X, or the complementary strand thereto. In this context “about” includes the particularly recited range or a range larger or smaller by several (5, 4, 3, 2, or 1) nucleotides, at either terminus or at both termini. Preferably, these fragments encode a polypeptide, which has a functional activity (e.g., biological activity). More preferably, these polynucleotides can be used as probes or primers as discussed herein. Polynucleotides which hybridize to one or more of these polynucleotides under stringent hybridization conditions or alternatively, under lower stringency conditions are also encompassed by the invention, as are polypeptides encoded by these polynucleotides.

[0129] Further representative examples of polynucleotide fragments of the invention, comprise, or alternatively consist of, a sequence from about nucleotide number 1-50, 51-100, 101-150, 151-200, 201-250, 251-300, 301-350, 351-400, 401- 450, 451-500, 501-550, 551-600, 651-700, 701-750, 751-800, 800-850, 851-900, 901- 950, 951-1000, 1001-1050, 1051-1100, 1101-1150, 1151-1200, 1201-1250, 1251- 1300, 1301-1350, 1351-1400, 1401-1450, 1451-1500, 1501-1550, 1551-1600, 1601- 1650, 1651-1700, 1701-1750, 1751-1800, 1801-1850, 1851-1900, 1901-1950, 1951- 2000, 2001-2050, 2051-2100, 2101-2150, 2151-2200, 2201-2250, 2251-2300, 2301- 2350, 2351-2400, 2401-2450, 2451-2500, 2501-2550, 2551-2600, 2601-2650, 2651- 2700, 2701-2750, 2751-2800, 2801-2850, 2851-2900, 2901-2950, 2951-3000, 3001- 3050, 3051-3100, 3101-3150, 3151-3200, 3201-3250, 3251-3300, 3301-3350, 3351- 3400, 3401-3450, 3451-3500, 3501-3550, 3551-3600, 3601-3650, 3651-3700, 3701- 3750, 3751-3800, 3801-3850, 3851-3900, 3901-3950, 3951-4000, 4001-4050, 4051- 4100, 4101-4150, 4151-4200, 4201-4250, 4251-4300, 4301-4350, 4351-4400, 4401- 4450, 4451-4500, 4501-4550, 4551-4600, 4601-4650, 4651-4700, 4701-4750, 4751- 4800, 4801-4850, 4851-4900, 4901-4950, 4951-5000, 5001-5050, 5051-5100, 5101- 5150, 5151-5200, 5201-5250, 5251-5300, 5301-5350, 5351-5400, 5401-5450, 5451- 5500, 5501-5550, 5551-5600, 5601-5650, 5651-5700, 5701-5750, 5751-5800, 5801- 5850, 5851-5900, 5901-5950, 5951-6000, 6001-6050, 6051-6100, 6101-6150, 6151- 6200, 6201-6250, 6251-6300, 6301-6350, 6351-6400, 6401-6450, 6451-6500, 6501- 6550, 6551-6600, 6601-6650, 6651-6700, 6701-6750, 6751-6800, 6801-6850, 6851- 6900, 6901-6950, 6951-7000, 7001-7050, 7051-7100, 7101-7150, 7151-7200, 7201- 7250, 7251-7300 or 7301 to the end of the cDNA sequence contained in Clone ID NO:Z, or the complementary strand thereto. In this context “about” includes the particularly recited range or a range larger or smaller by several (5, 4, 3, 2, or 1) nucleotides, at either terminus or at both termini. Preferably, these fragments encode a polypeptide, which has a functional activity (e.g., biological activity). More preferably, these polynucleotides can be used as probes or primers as discussed herein. Polynucleotides which hybridize to one or more of these polynucleotides under stringent hybridization conditions or alternatively, under lower stringency conditions are also encompassed by the invention, as are polypeptides encoded by these polynucleotides.

[0130] Moreover, representative examples of polynucleotide fragments of the invention comprise, or alternatively consist of, a nucleic acid sequence comprising one, two, three, four, five, six, seven, eight, nine, ten, or more of the above described polynucleotide fragments of the invention in combination with a polynucleotide sequence delineated in Table 1B column 6. Additional, representative examples of polynucleotide fragments of the invention comprise, or alternatively consist of, a nucleic acid sequence comprising one, two, three, four, five, six, seven, eight, nine, ten, or more of the above described polynucleotide fragments of the invention in combination with a polynucleotide sequence that is the complementary strand of a sequence delineated in column 6 of Table 1B. In further embodiments, the above-described polynucleotide fragments of the invention comprise, or alternatively consist of, sequences delineated in Table 1B, column 6, and have a nucleic acid sequence which is different from that of the BAC fragment having the sequence disclosed in SEQ ID NO:B (see Table 1B, column 5). In additional embodiments, the above-described polynucleotide fragments of the invention comprise, or alternatively consist of, sequences delineated in Table 1B, column 6, and have a nucleic acid sequence which is different from that published for the BAC clone identified as BAC ID NO:A (see Table 1B, column 4). In additional embodiments, the above-described polynucleotides of the invention comprise, or alternatively consist of, sequences delineated Table 1B, column 6, and have a nucleic acid sequence which is different from that contained in the BAC clone identified as BAC ID NO:A (see Table 1B, column 4). Polypeptides encoded by these polynucleotides, other polynucleotides that encode these polypeptides, and antibodies that bind these polypeptides are also encompassed by the invention. Additionally, fragments and variants of the above-described polynucleotides and polypeptides are also encompassed by the invention.

[0131] In additional specific embodiments, polynucleotides of the invention comprise, or alternatively consist of, one, two, three, four, five, six, seven, eight, nine, ten, or more fragments of the sequences delineated in column 6 of Table 1B, and the polynucleotide sequence of SEQ ID NO:X (e.g., as defined in Table 1B, column 2) or fragments or variants thereof. Polypeptides encoded by these polynucleotides, other polynucleotides that encode these polypeptides, and antibodies that bind these polypeptides are also encompassed by the invention.

[0132] In additional specific embodiments, polynucleotides of the invention comprise, or alternatively consist of, one, two, three, four, five, six, seven, eight, nine, ten, or more fragments of the sequences delineated in column 6 of Table 1B which correspond to the same Clone ID NO:Z (see Table 1B, column 1), and the polynucleotide sequence of SEQ ID NO:X (e.g., as defined in Table 1A or 1B) or fragments or variants thereof. Polypeptides encoded by these polynucleotides, other polynucleotides that encode these polypeptides, and antibodies that bind these polypeptides are also encompassed by the invention.

[0133] In further specific embodiments, polynucleotides of the invention comprise, or alternatively consist of, one, two, three, four, five, six, seven, eight, nine, ten, or more fragments of the sequences delineated in the same row of column 6 of Table 1B, and the polynucleotide sequence of SEQ ID NO:X (e.g., as defined in Table 1A or 1B) or fragments or variants thereof. Polypeptides encoded by these polynucleotides, other polynucleotides that encode these polypeptides, and antibodies that bind these polypeptides are also encompassed by the invention.

[0134] In additional specific embodiments, polynucleotides of the invention comprise, or alternatively consist of a polynucleotide sequence in which the 3′ 10 polynucleotides of one of the sequences delineated in column 6 of Table 1B and the 5′ 10 polynucleotides of the sequence of SEQ ID NO:X are directly contiguous. Nucleic acids which hybridize to the complement of these 20 contiguous polynucleotides under stringent hybridization conditions or alternatively, under lower stringency conditions, are also encompassed by the invention. Polypeptides encoded by these polynucleotides and/or nucleic acids, other polynucleotides and/or nucleic acids that encode these polypeptides, and antibodies that bind these polypeptides are also encompassed by the invention. Additionally, fragments and variants of the above-described polynucleotides, nucleic acids, and polypeptides are also encompassed by the invention.

[0135] In additional specific embodiments, polynucleotides of the invention comprise, or alternatively consist of a polynucleotide sequence in which the 3′ 10 polynucleotides of one of the sequences delineated in column 6 of Table 1B and the 5′ 10 polynucleotides of a fragment or variant of the sequence of SEQ ID NO:X (e.g., as described herein) are directly contiguous Nucleic acids which hybridize to the complement of these 20 contiguous polynucleotides under stringent hybridization conditions or alternatively, under lower stringency conditions, are also encompassed by the invention. Polypeptides encoded by these polynucleotides and/or nucleic acids, other polynucleotides and/or nucleic acids encoding these polypeptides, and antibodies that bind these polypeptides are also encompassed by the invention. Additionally, fragments and variants of the above-described polynucleotides, nucleic acids, and polypeptides are also encompassed by the invention.

[0136] In further specific embodiments, polynucleotides of the invention comprise, or alternatively consist of a polynucleotide sequence in which the 3′ 10 polynucleotides of a fragment or variant of the sequence of SEQ ID NO:X and the 5′ 10 polynucleotides of the sequence of one of the sequences delineated in column 6 of Table 1B are directly contiguous. Nucleic acids which hybridize to the complement of these 20 contiguous polynucleotides under stringent hybridization conditions or alternatively, under lower stringency conditions, are also encompassed by the invention. Polypeptides encoded by these polynucleotides and/or nucleic acids, other polynucleotides and/or nucleic acids encoding these polypeptides, and antibodies that bind these polypeptides are also encompassed by the invention. Additionally, fragments and variants of the above-described polynucleotides, nucleic acids, and polypeptides are also encompassed by the invention.

[0137] In specific embodiments, polynucleotides of the invention comprise, or alternatively consist of a polynucleotide sequence in which the 3′ 10 polynucleotides of one of the sequences delineated in column 6 of Table 1B and the 5′ 10 polynucleotides of another sequence in column 6 are directly contiguous. In preferred embodiments, the 3′ 10 polynucleotides of one of the sequences delineated in column 6 of Table 1B is directly contiguous with the 5′ 10 polynucleotides of the next sequential exon delineated in Table 1B, column 6. Nucleic acids which hybridize to the complement of these 20 contiguous polynucleotides under stringent hybridization conditions or alternatively, under lower stringency conditions, are also encompassed by the invention. Polypeptides encoded by these polynucleotides and/or nucleic acids, other polynucleotides and/or nucleic acids encoding these polypeptides, and antibodies that bind these polypeptides are also encompassed by the invention. Additionally, fragments and variants of the above-described polynucleotides, nucleic acids, and polypeptides are also encompassed by the invention.

[0138] In the present invention, a “polypeptide fragment” refers to an amino acid sequence which is a portion of that contained in SEQ ID NO:Y, a portion of an amino acid sequence encoded by the portion of SEQ ID NO:X as defined in columns 8 and 9 of Table 2, a portion of an amino acid sequence encoded by the polynucleotide sequence of SEQ ID NO:X, a portion of an amino acid sequence encoded by the complement of the polynucleotide sequence in SEQ ID NO:X, and/or a portion of an amino acid sequence encoded by the cDNA contained in Clone ID NO:Z. Protein (polypeptide) fragments may be “free-standing,” or comprised within a larger polypeptide of which the fragment forms a part or region, most preferably as a single continuous region. Representative examples of polypeptide fragments of the invention, include, for example, fragments comprising, or alternatively consisting of, from about amino acid number 1-20, 21-40, 41-60, 61-80, 81-100, 102-120, 121-140, 141-160, 161-180, 181-200, 201-220, 221-240, 241-260, 261-280, 281-300, 301- 320, 321-340, 341-360, 361-380, 381-400, 401-420, 421-440, 441-460, 461-480, 481- 500, 501-520, 521-540, 541-560, 561-580, 581-600, 601-620, 621-640, 641-660, 661- 680, 681-700, 701-720, 721-740, 741-760, 761-780, 781-800, 801-820, 821-840, 841- 860, 861-880, 881-900, 901-920, 921-940, 941-960, 961-980, 981-1000, 1001-1020, 1021- 1040, 1041-1060, 1061-1080, 1081-1100, 1101-1120, 1121-1140, 1141-1160, 1161- 1180, 1181-1200, 1201-1220, 1221-1240, 1241-1260, 1261-1280, 1281-1300, 1301- 1320, 1321-1340, 1341-1360, 1361-1380, 1381-1400, 1401-1420, 1421-1440, or 1441 to the end of the coding region. In a preferred embodiment, polypeptide fragments of the invention include, for example, fragments comprising, or alternatively consisting of, from about amino acid number 1-20, 21-40, 41-60, 61-80, 81-100, 102-120, 121-140, 141- 160, 161-180, 181-200, 201-220, 221-240, 241-260, 261-280, 281-300, 301- 320, 321-340, 341-360, 361-380, 381-400, 401-420, 421-440, 441-460, 461-480, 481- 500, 501-520, 521-540, 541-560, 561-580, 581-600, 601-620, 621-640, 641-660, 661- 680, 681-700, 701-720, 721-740, 741-760, 761-780, 781-800, 801-820, 821-840, 841- 860, 861-880, 881-900, 901-920, 921-940, 941-960, 961-980, 981-1000, 1001-1020, 1021-1040, 1041-1060, 1061-1080, 1081-1100, 1101-1120, 1121-1140, 1141-1160, 1161-1180, 1181-1200, 1201-1220, 1221-1240, 1241-1260, 1261-1280, 1281-1300, 1301-1320, 1321-1340, 1341-1360, 1361-1380, 1381-1400, 1401-1420, 1421-1440, or 1441 to the end of the coding region of SEQ ID NO:Y. Moreover, polypeptide fragments of the invention may be at least about 10, 15, 20, 25, 30, 35, 40, 45, 50, 55, 60, 65, 70, 75, 80, 85, 90, 100, 110, 120, 130, 140, or 150 amino acids in length. In this context “about” includes the particularly recited ranges or values, or ranges or values larger or smaller by several (5, 4, 3, 2, or 1) amino acids, at either extreme or at both extremes. Polynucleotides encoding these polypeptide fragments are also encompassed by the invention.

[0139] Even if deletion of one or more amino acids from the N-terminus of a protein results in modification of loss of one or more biological functions of the protein, other functional activities (e.g., biological activities, ability to multimerize, ability to bind a ligand) may still be retained. For example, the ability of shortened muteins to induce and/or bind to antibodies which recognize the complete or mature forms of the polypeptides generally will be retained when less than the majority of the residues of the complete or mature polypeptide are removed from the N-terminus. Whether a particular polypeptide lacking N-terminal residues of a complete polypeptide retains such immunologic activities can readily be determined by routine methods described herein and otherwise known in the art. It is not unlikely that a mutein with a large number of deleted N-terminal amino acid residues may retain some biological or immunogenic activities. In fact, peptides composed of as few as six amino acid residues may often evoke an immune response.

[0140] Accordingly, polypeptide fragments include the secreted protein as well as the mature form. Further preferred polypeptide fragments include the secreted protein or the mature form having a continuous series of deleted residues from the amino or the carboxy terminus, or both. For example, any number of amino acids, ranging from 1-60, can be deleted from the amino terminus of either the secreted polypeptide or the mature form. Similarly, any number of amino acids, ranging from 1-30, can be deleted from the carboxy terminus of the secreted protein or mature form. Furthermore, any combination of the above amino and carboxy terminus deletions is preferred. Similarly, polynucleotides encoding these polypeptide fragments are also preferred.

[0141] The present invention further provides polypeptides having one or more residues deleted from the amino terminus of the amino acid sequence of a polypeptide disclosed herein (e.g., a polypeptide of SEQ ID NO:Y, a polypeptide encoded by the polynucleotide sequence contained in SEQ ID NO:X or the complement thereof, a polypeptide encoded by the portion of SEQ ID NO:X as defined in columns 8 and 9 of Table 2, a polypeptide encoded by the portion of SEQ ID NO:B as defined in column 6 of Table 1B, and/or a polypeptide encoded by the cDNA contained in Clone ID NO:Z). In particular, N-terminal deletions may be described by the general formula m−q, where q is a whole integer representing the total number of amino acid residues in a polypeptide of the invention (e.g., the polypeptide disclosed in SEQ ID NO:Y, or the polypeptide encoded by the portion of SEQ ID NO:X as defined in columns 8 and 9 of Table 2), and m is defined as any integer ranging from 2 to q−6. Polynucleotides encoding these polypeptides are also encompassed by the invention.

[0142] The present invention further provides polypeptides having one or more residues from the carboxy terminus of the amino acid sequence of a polypeptide disclosed herein (e.g., a polypeptide of SEQ ID NO:Y, a polypeptide encoded by the polynucleotide sequence contained in SEQ ID NO:X, a polypeptide encoded by the portion of SEQ ID NO:X as defined in columns 8 and 9 of Table 2, and/or a polypeptide encoded by the cDNA contained in Clone ID NO:Z). In particular, C-terminal deletions may be described by the general formula 1−n, where n is any whole integer ranging from 6 to q−1, and where n corresponds to the position of amino acid residue in a polypeptide of the invention. Polynucleotides encoding these polypeptides are also encompassed by the invention.

[0143] In addition, any of the above described N- or C-terminal deletions can be combined to produce a N- and C-terminal deleted polypeptide. The invention also provides polypeptides having one or more amino acids deleted from both the amino and the carboxyl termini, which may be described generally as having residues m−n of a polypeptide encoded by SEQ ID NO:X (e.g., including, but not limited to, the preferred polypeptide disclosed as SEQ ID NO:Y and the polypeptide encoded by the portion of SEQ ID NO:X as defined in columns 8 and 9 of Table 2), the cDNA contained in Clone ID NO:Z, and/or the complement thereof, where n and m are integers as described above. Polynucleotides encoding these polypeptides are also encompassed by the invention.

[0144] Also as mentioned above, even if deletion of one or more amino acids from the C-terminus of a protein results in modification of loss of one or more biological functions of the protein, other functional activities (e.g., biological activities, ability to multimerize, ability to bind a ligand) may still be retained. For example the ability of the shortened mutein to induce and/or bind to antibodies which recognize the complete or mature forms of the polypeptide generally will be retained when less than the majority of the residues of the complete or mature polypeptide are removed from the C-terminus. Whether a particular polypeptide lacking C-terminal residues of a complete polypeptide retains such immunologic activities can readily be determined by routine methods described herein and otherwise known in the art. It is not unlikely that a mutein with a large number of deleted C-terminal amino acid residues may retain some biological or immunogenic activities. In fact, peptides composed of as few as six amino acid residues may often evoke an immune response.

[0145] The present application is also directed to proteins containing polypeptides at least 80%, 85%, 90%, 95%, 96%, 97%, 98% or 99% identical to a polypeptide sequence set forth herein. In preferred embodiments, the application is directed to proteins containing polypeptides at least 80%, 85%, 90%, 95%, 96%, 97%, 98% or 99% identical to polypeptides having the amino acid sequence of the specific N- and C-terminal deletions. Polynucleotides encoding these polypeptides are also encompassed by the invention.

[0146] Any polypeptide sequence encoded by, for example, the polynucleotide sequences set forth as SEQ ID NO:X or the complement thereof, (presented, for example, in Tables 1A and 2), the cDNA contained in Clone ID NO:Z, or the polynucleotide sequence as defined in column 6 of Table 1B, may be analyzed to determine certain preferred regions of the polypeptide. For example, the amino acid sequence of a polypeptide encoded by a polynucleotide sequence of SEQ ID NO:X (e.g., the polypeptide of SEQ ID NO:Y and the polypeptide encoded by the portion of SEQ ID NO:X as defined in columns 8 and 9 of Table 2) or the cDNA contained in Clone ID NO:Z may be analyzed using the default parameters of the DNASTAR computer algorithm (DNASTAR, Inc., 1228 S. Park St., Madison, Wis. 53715 USA; http://www.dnastar.coni/).

[0147] Polypeptide regions that may be routinely obtained using the DNASTAR computer algorithm include, but are not limited to, Gamier-Robson alpha-regions, beta-regions, turn-regions, and coil-regions; Chou-Fasman alpha-regions, beta-regions, and turn-regions; Kyte-Doolittle hydrophilic regions and hydrophobic regions; Eisenberg alpha- and beta-amphipathic regions; Karplus-Schulz flexible regions; Emini surface-forming regions; and Jameson-Wolf regions of high antigenic index. Among highly preferred polynucleotides of the invention in this regard are those that encode polypeptides comprising regions that combine several structural features, such as several (e.g., 1, 2, 3 or 4) of the features set out above.

[0148] Additionally, Kyte-Doolittle hydrophilic regions and hydrophobic regions, Emini surface-forming regions, and Jameson-Wolf regions of high antigenic index (i.e., containing four or more contiguous amino acids having an antigenic index of greater than or equal to 1.5, as identified using the default parameters of the Jameson-Wolf program) can routinely be used to determine polypeptide regions that exhibit a high degree of potential for antigenicity. Regions of high antigenicity are determined from data by DNASTAR analysis by choosing values which represent regions of the polypeptide which are likely to be exposed on the surface of the polypeptide in an environment in which antigen recognition may occur in the process of initiation of an immune response.

[0149] Preferred polypeptide fragments of the invention are fragments comprising, or alternatively, consisting of, an amino acid sequence that displays a functional activity (e.g. biological activity) of the polypeptide sequence of which the amino acid sequence is a fragment. By a polypeptide displaying a “functional activity” is meant a polypeptide capable of one or more known functional activities associated with a full-length protein, such as, for example, biological activity, antigenicity, immunogenicity, and/or multimerization, as described herein.

[0150] Other preferred polypeptide fragments are biologically active fragments. Biologically active fragments are those exhibiting activity similar, but not necessarily identical, to an activity of the polypeptide of the present invention. The biological activity of the fragments may include an improved desired activity, or a decreased undesirable activity.

[0151] In preferred embodiments, polypeptides of the invention comprise, or alternatively consist of, one, two, three, four, five or more of the antigenic fragments of the polypeptide of SEQ ID NO:Y, or portions thereof. Polynucleotides encoding these polypeptides are also encompassed by the invention.

[0152] The present invention encompasses polypeptides comprising, or alternatively consisting of, an epitope of: the polypeptide sequence shown in SEQ ID NO:Y; a polypeptide sequence encoded by SEQ ID NO:X or the complementary strand thereto; the polypeptide sequence encoded by the portion of SEQ ID NO:X as defined in columns 8 and 9 of Table 2; the polypeptide sequence encoded by the portion of SEQ ID NO:B as defined in column 6 of Table 1B or the complement thereto; the polypeptide sequence encoded by the cDNA contained in Clone ID NO:Z; or the polypeptide sequence encoded by a polynucleotide that hybridizes to the sequence of SEQ ID NO:X, the complement of the sequence of SEQ ID NO:X, the complement of a portion of SEQ ID NO:X as defined in columns 8 and 9 of Table 2, or the cDNA sequence contained in Clone ID NO:Z under stringent hybridization conditions or alternatively, under lower stringency hybridization as defined supra. The present invention further encompasses polynucleotide sequences encoding an epitope of a polypeptide sequence of the invention (such as, for example, the sequence disclosed in SEQ ID NO:X, or a fragment thereof), polynucleotide sequences of the complementary strand of a polynucleotide sequence encoding an epitope of the invention, and polynucleotide sequences which hybridize to the complementary strand under stringent hybridization conditions or alternatively, under lower stringency hybridization conditions defined supra.

[0153] The term “epitopes,” as used herein, refers to portions of a polypeptide having antigenic or immunogenic activity in an animal, preferably a mammal, and most preferably in a human. In a preferred embodiment, the present invention encompasses a polypeptide comprising an epitope, as well as the polynucleotide encoding this polypeptide. An “immunogenic epitope,” as used herein, is defined as a portion of a protein that elicits an antibody response in an animal, as determined by any method known in the art, for example, by the methods for generating antibodies described infra. (See, for example, Geysen et al., Proc. Natl. Acad. Sci. USA 81:3998-4002 (1983)). The term “antigenic epitope,” as used herein, is defined as a portion of a protein to which an antibody can immunospecifically bind its antigen as determined by any method well known in the art, for example, by the immunoassays described herein. Immunospecific binding excludes non-specific binding but does not necessarily exclude cross-reactivity with other antigens. Antigenic epitopes need not necessarily be immunogenic.

[0154] Fragments, which function as epitopes may be produced by any conventional means. (See, e.g., Houghten, R. A., Proc. Natl. Acad. Sci. USA 82:5131-5135 (1985) further described in U.S. Pat. No. 4,631,211.)

[0155] In the present invention, antigenic epitopes preferably contain a sequence of at least 4, at least 5, at least 6, at least 7, more preferably at least 8, at least 9, at least 10, at least 11, at least 12, at least 13, at least 14, at least 15, at least 20, at least 25, at least 30, at least 40, at least 50, and, most preferably, between about 15 to about 30 amino acids. Preferred polypeptides comprising immunogenic or antigenic epitopes are at least 10, 15, 20, 25, 30, 35, 40, 45, 50, 55, 60, 65, 70, 75, 80, 85, 90, 95, or 100 amino acid residues in length. Additional non-exclusive preferred antigenic epitopes include the antigenic epitopes disclosed herein, as well as portions thereof. Antigenic epitopes are useful, for example, to raise antibodies, including monoclonal antibodies, that specifically bind the epitope. Preferred antigenic epitopes include the antigenic epitopes disclosed herein, as well as any combination of two, three, four, five or more of these antigenic epitopes. Antigenic epitopes can be used as the target molecules in immunoassays. (See, for instance, Wilson et al., Cell 37:767-778 (1984); Sutcliffe et al., Science 219:660-666 (1983)).

[0156] Non-limiting examples of epitopes of polypeptides that can be used to generate antibodies of the invention include a polypeptide comprising, or alternatively consisting of, at least one, two, three, four, five, six or more of the portion(s) of SEQ ID NO:Y specified in column 6 of Table 1A. These polypeptide fragments have been determined to bear antigenic epitopes of the proteins of the invention by the analysis of the Jameson-Wolf antigenic index, which is included in the DNAStar suite of computer programs. By “comprise” it is intended that a polypeptide contains at least one, two, three, four, five, six or more of the portion(s) of SEQ ID NO:Y shown in column 6 of Table 1A, but it may contain additional flanking residues on either the amino or carboxyl termini of the recited portion. Such additional flanking sequences are preferably sequences naturally found adjacent to the portion; i.e., contiguous sequence shown in SEQ ID NO:Y. The flanking sequence may, however, be sequences from a heterolgous polypeptide, such as from another protein described herein or from a heterologous polypeptide not described herein. In particular embodiments, epitope portions of a polypeptide of the invention comprise one, two, three, or more of the portions of SEQ ID NO:Y shown in column 6 of Table 1A. Polynucleotides encoding these polypeptides are also encompassed by the invention.

[0157] Similarly, immunogenic epitopes can be used, for example, to induce antibodies according to methods well known in the art. See, for instance, Sutcliffe et al., supra; Wilson et al., supra; Chow et al., Proc. Natl. Acad. Sci. USA 82:910-914; and Bittle et al., J. Gen. Virol. 66:2347-2354 (1985). Preferred immunogenic epitopes include the immunogenic epitopes disclosed herein, as well as any combination of two, three, four, five or more of these immunogenic epitopes. The polypeptides comprising one or more immunogenic epitopes may be presented for eliciting an antibody response together with a carrier protein, such as an albumin, to an animal system (such as rabbit or mouse), or, if the polypeptide is of sufficient length (at least about 25 amino acids), the polypeptide may be presented without a carrier. However, immunogenic epitopes comprising as few as 8 to 10 amino acids have been shown to be sufficient to raise antibodies capable of binding to, at the very least, linear epitopes in a denatured polypeptide (e.g., in Western blotting).

[0158] Epitope-bearing polypeptides of the present invention may be used to induce antibodies according to methods well known in the art including, but not limited to, in vivo immunization, in vitro immunization, and phage display methods. See, e.g., Sutcliffe et al., supra; Wilson et al., supra, and Bittle et al., J. Gen. Virol., 66:2347-2354 (1985). If in vivo immunization is used, animals may be immunized with free peptide; however, anti-peptide antibody titer may be boosted by coupling the peptide to a macromolecular carrier, such as keyhole limpet hemacyanin (KLH) or tetanus toxoid. For instance, peptides containing cysteine residues may be coupled to a carrier using a linker such as maleimidobenzoyl-N-hydroxysuccinimide ester (MBS), while other peptides may be coupled to carriers using a more general linking agent such as glutaraldehyde. Animals such as rabbits, rats and mice are immunized with either free or carrier-coupled peptides, for instance, by intraperitoneal and/or intradermal injection of emulsions containing about 100 μg of peptide or carrier protein and Freund's adjuvant or any other adjuvant known for stimulating an immune response. Several booster injections may be needed, for instance, at intervals of about two weeks, to provide a useful titer of anti-peptide antibody which can be detected, for example, by ELISA assay using free peptide adsorbed to a solid surface. The titer of anti-peptide antibodies in serum from an immunized animal may be increased by selection of anti-peptide antibodies, for instance, by adsorption to the peptide on a solid support and elution of the selected antibodies according to methods well known in the art.

[0159] As one of skill in the art will appreciate, and as discussed above, the polypeptides of the present invention (e.g., those comprising an immunogenic or antigenic epitope) can be fused to heterologous polypeptide sequences. For example, polypeptides of the present invention (including fragments or variants thereof), may be fused with the constant domain of immunoglobulins (IgA, IgE, IgG, IgM), or portions thereof (CH1, CH2, CH3, or any combination thereof and portions thereof, resulting in chimeric polypeptides. By way of another non-limiting example, polypeptides and/or antibodies of the present invention (including fragments or variants thereof) may be fused with albumin (including but not limited to recombinant human serum albumin or fragments or variants thereof (see, e.g., U.S. Pat. No. 5,876,969, issued Mar. 2, 1999, EP Patent 0 413 622, and U.S. Pat. No. 5,766,883, issued Jun. 16, 1998, herein incorporated by reference in their entirety)). In a preferred embodiment, polypeptides and/or antibodies of the present invention (including fragments or variants thereof) are fused with the mature form of human serum albumin (i.e., amino acids 1-585 of human serum albumin as shown in FIGS. 1 and 2 of EP Patent 0 322 094) which is herein incorporated by reference in its entirety. In another preferred embodiment, polypeptides and/or antibodies of the present invention (including fragments or variants thereof) are fused with polypeptide fragments comprising, or alternatively consisting of, amino acid residues 1−z of human serum albumin, where z is an integer from 369 to 419, as described in U.S. Pat. No. 5,766,883 herein incorporated by reference in its entirety. Polypeptides and/or antibodies of the present invention (including fragments or variants thereof) may be fused to either the N- or C-terminal end of the heterologous protein (e.g., immunoglobulin Fc polypeptide or human serum albumin polypeptide). Polynucleotides encoding fusion proteins of the invention are also encompassed by the invention.

[0160] Such fusion proteins as those described above may facilitate purification and may increase half-life in vivo. This has been shown for chimeric proteins consisting of the first two domains of the human CD4-polypeptide and various domains of the constant regions of the heavy or light chains of mammalian immunoglobulins. See, e.g., EP 394,827; Traunecker et al., Nature, 331:84-86 (1988). Enhanced delivery of an antigen across the epithelial barrier to the immune system has been demonstrated for antigens (e.g., insulin) conjugated to an FcRn binding partner such as IgG or Fc fragments (see, e.g., PCT Publications WO 96/22024 and WO 99/04813). IgG Fusion proteins that have a disulfide-linked dimeric structure due to the IgG portion desulfide bonds have also been found to be more efficient in binding and neutralizing other molecules than monomeric polypeptides or fragments thereof alone. See, e.g., Fountoulakis et al., J. Biochem., 270:3958-3964 (1995). Nucleic acids encoding the above epitopes can also be recombined with a gene of interest as an epitope tag (e.g., the hemagglutinin (HA) tag or flag tag) to aid in detection and purification of the expressed polypeptide. For example, a system described by Janknecht et al. allows for the ready purification of non-denatured fusion proteins expressed in human cell lines (Janknecht et al., 1991, Proc. Natl. Acad. Sci. USA 88:8972-897). In this system, the gene of interest is subcloned into a vaccinia recombination plasmid such that the open reading frame of the gene is translationally fused to an amino-terminal tag consisting of six histidine residues. The tag serves as a matrix binding domain for the fusion protein. Extracts from cells infected with the recombinant vaccinia virus are loaded onto Ni2+nitriloacetic acid-agarose column and histidine-tagged proteins can be selectively eluted with imidazole-containing buffers.

[0161] Fusion Proteins

[0162] Any polypeptide of the present invention can be used to generate fusion proteins. For example, the polypeptide of the present invention, when fused to a second protein, can be used as an antigenic tag. Antibodies raised against the polypeptide of the present invention can be used to indirectly detect the second protein by binding to the polypeptide. Moreover, because secreted proteins target cellular locations based on trafficking signals, polypeptides of the present invention which are shown to be secreted can be used as targeting molecules once fused to other proteins.

[0163] Examples of domains that can be fused to polypeptides of the present invention include not only heterologous signal sequences, but also other heterologous functional regions. The fusion does not necessarily need to be direct, but may occur through linker sequences.

[0164] In certain preferred embodiments, proteins of the invention are fusion proteins comprising an amino acid sequence that is an N and/or C-terminal deletion of a polypeptide of the invention. In preferred embodiments, the invention is directed to a fusion protein comprising an amino acid sequence that is at least 80%, 85%, 90%, 95%, 96%, 97%, 98% or 99% identical to a polypeptide sequence of the invention. Polynucleotides encoding these proteins are also encompassed by the invention.

[0165] Moreover, fusion proteins may also be engineered to improve characteristics of the polypeptide of the present invention. For instance, a region of additional amino acids, particularly charged amino acids, may be added to the N-terminus of the polypeptide to improve stability and persistence during purification from the host cell or subsequent handling and storage. Also, peptide moieties may be added to the polypeptide to facilitate purification. Such regions may be removed prior to final preparation of the polypeptide. The addition of peptide moieties to facilitate handling of polypeptides is familiar and routine techniques in the art.

[0166] As one of skill in the art will appreciate that, as discussed above, polypeptides of the present invention, and epitope-bearing fragments thereof, can be combined with heterologous polypeptide sequences. For example, the polypeptides of the present invention may be fused with heterologous polypeptide sequences, for example, the polypeptides of the present invention may be fused with the constant domain of immunoglobulins (IgA, IgE, IgG, IgM) or portions thereof (CH1, CH2, CH3, and any combination thereof, including both entire domains and portions thereof), or albumin (including, but not limited to, native or recombinant human albumin or fragments or variants thereof (see, e.g., U.S. Pat. No. 5,876,969, issued Mar. 2, 1999, EP Patent 0 413 622, and U.S. Pat. No. 5,766,883, issued Jun. 16, 1998, herein incorporated by reference in their entirety)), resulting in chimeric polypeptides. For example, EP-A-O 464 533 (Canadian counterpart 2045869) discloses fusion proteins comprising various portions of constant region of immunoglobulin molecules together with another human protein or part thereof. In many cases, the Fc part in a fusion protein is beneficial in therapy and diagnosis, and thus can result in, for example, improved pharmacokinetic properties (EP-A 0232 262). Alternatively, deleting the Fc part after the fusion protein has been expressed, detected, and purified, would be desired. For example, the Fc portion may hinder therapy and diagnosis if the fusion protein is used as an antigen for immunizations. In drug discovery, for example, human proteins, such as hIL-5, have been fused with Fc portions for the purpose of high-throughput screening assays to identify antagonists of hIL-5. See, D. Bennett et al., J. Molecular Recognition 8:52-58 (1995); K. Johanson et al., J. Biol. Chem. 270:9459-9471 (1995).

[0167] Moreover, the polypeptides of the present invention can be fused to marker sequences, such as a polypeptide, which facilitates purification of the fused polypeptide. In preferred embodiments, the marker amino acid sequence is a hexahistidine peptide, such as the tag provided in a pQE vector (QIAGEN, Inc., 9259 Eton Avenue, Chatsworth, Calif., 91311), among others, many of which are commercially available. As described in Gentz et al., Proc. Natl. Acad. Sci. USA 86:821-824 (1989), for instance, hexa-histidine provides for convenient purification of the fusion protein. Another peptide tag useful for purification, the “HA” tag, corresponds to an epitope derived from the influenza hemagglutinin protein (Wilson et al., Cell 37:767 (1984).)

[0168] Additional fusion proteins of the invention may be generated through the techniques of gene-shuffling, motif-shuffling, exon-shuffling, and/or codon-shuffling (collectively referred to as “DNA shuffling”), briefly described below, and further described herein. DNA shuffling may be employed to modulate the activities of polypeptides of the invention, such methods can be used to generate polypeptides with altered activity, as well as agonists and antagonists of the polypeptides. See, generally, U.S. Pat. Nos. 5,605,793; 5,811,238; 5,830,721; 5,834,252; and 5,837,458, and Patten et al., Curr. Opinion Biotechnol. 8:724-33 (1997); Harayama, Trends Biotechnol. 16(2):76-82 (1998); Hansson et al., J. Mol. Biol. 287:265-76 (1999); and Lorenzo and Blasco, Biotechniques 24(2):308-13 (1998); each of these patents and publications are hereby incorporated by reference in its entirety). In a preferred embodiment, one or more components, motifs, sections, parts, domains, fragments, etc., of a polynucleotide encoding a polypeptide of the invention may be recombined with one or more components, motifs, sections, parts, domains, fragments, etc., of one or more heterologous molecules encoding a heterologous polypeptide.

[0169] Thus, any of these above fusions can be engineered using the polynucleotides or the polypeptides of the present invention.

[0170] Recombinant and Synthetic Production of Polypeptides of the Invention

[0171] The present invention also relates to vectors containing the polynucleotide of the present invention, host cells, and the production of polypeptides by synthetic and recombinant techniques. The vector may be, for example, a phage, plasmid, viral, or retroviral vector. Retroviral vectors may be replication competent or replication defective. In the latter case, viral propagation generally will occur only in complementing host cells.

[0172] The polynucleotides of the invention may be joined to a vector containing a selectable marker for propagation in a host. Generally, a plasmid vector is introduced in a precipitate, such as a calcium phosphate precipitate, or in a complex with a charged lipid. If the vector is a virus, it may be packaged in vitro using an appropriate packaging cell line and then transduced into host cells.

[0173] The polynucleotide insert should be operatively linked to an appropriate promoter, such as the phage lambda PL promoter, the E. coli lac, trp, phoA and tac promoters, the SV40 early and late promoters and promoters of retroviral LTRs, to name a few. Other suitable promoters will be known to the skilled artisan. The expression constructs will further contain sites for transcription initiation, termination, and, in the transcribed region, a ribosome binding site for translation. The coding portion of the transcripts expressed by the constructs will preferably include a translation initiating codon at the beginning and a termination codon (UAA, UGA or UAG) appropriately positioned at the end of the polypeptide to be translated.

[0174] As indicated, the expression vectors will preferably include at least one selectable marker. Such markers include dihydrofolate reductase, G418 or neomycin resistance, glutamine synthase, for eukaryotic cell culture and tetracycline, kanamycin or ampicillin resistance genes for culturing in E. coli and other bacteria. Representative examples of appropriate hosts include, but are not limited to, bacterial cells, such as E. coli, Streptomyces and Salmonella typhimurium cells; fungal cells, such as yeast cells (e.g., Saccharomyces cerevisiae or Pichia pastoris (ATCC Accession No. 201178)); insect cells such as Drosophila S2 and Spodoptera Sf9 cells; animal cells such as CHO, COS, 293, NSO and Bowes melanoma cells; and plant cells. Appropriate culture mediums and conditions for the above-described host cells are known in the art.

[0175] Among vectors preferred for use in bacteria include pQE70, pQE60 and pQE-9, available from QIAGEN, Inc.; pBluescript vectors, Phagescript vectors, pNH8A, pNH16a, pNH18A, pNH46A, available from Stratagene Cloning Systems, Inc.; and ptrc99a, pKK223-3, pKK233-3, pDR540, pRIT5 available from Pharnacia Biotech, Inc. Among preferred eukaryotic vectors are pWLNEO, pSV2CAT, pOG44, pXT1 and pSG available from Stratagene; and pSVK3, pBPV, pMSG and pSVL available from Pharmacia. Preferred expression vectors for use in yeast systems include, but are not limited to pYES2, pYD1, pTEF1/Zeo, pYES2/GS, pPICZ, pGAPZ, pGAPZalph, pPIC9, pPIC3.5, pHIL-D2, pHIL-S1, pPIC3.5K, pPIC9K, and PAO815 (all available from Invitrogen, Carlsbad, Calif.). Other suitable vectors will be readily apparent to the skilled artisan.

[0176] Vectors which use glutamine synthase (GS) or DHFR as the selectable markers can be amplified in the presence of the drugs methionine sulphoximine or methotrexate, respectively. An advantage of glutamine synthase based vectors is the availabilty of cell lines (e.g., the murine myeloma cell line, NSO) which are glutamine synthase negative. Glutamine synthase expression systems can also function in glutamine synthase expressing cells (e.g., Chinese Hamster Ovary (CHO) cells) by providing additional inhibitor to prevent the functioning of the endogenous gene. A glutamine synthase expression system and components thereof are detailed in PCT publications: WO87/04462; WO86/05807; WO89/01036; WO89/10404; and WO91/06657 which are hereby incorporated in their entireties by reference herein. Additionally, glutamine synthase expression vectors can be obtained from Lonza Biologics, Inc. (Portsmouth, NH). Expression and production of monoclonal antibodies using a GS expression system in murine myeloma cells is described in Bebbington et al., Bio/technology 10:169(1992) and in Biblia and Robinson Biotechnol. Prog. 11:1 (1995) which are herein incorporated by reference.

[0177] The present invention also relates to host cells containing the above-described vector constructs described herein, and additionally encompasses host cells containing nucleotide sequences of the invention that are operably associated with one or more heterologous control regions (e.g., promoter and/or enhancer) using techniques known of in the art. The host cell can be a higher eukaryotic cell, such as a mammalian cell (e.g., a human derived cell), or a lower eukaryotic cell, such as a yeast cell, or the host cell can be a prokaryotic cell, such as a bacterial cell. A host strain may be chosen, which modulates the expression of the inserted gene sequences, or modifies and processes the gene product in the specific fashion desired. Expression from certain promoters can be elevated in the presence of certain inducers; thus expression of the genetically engineered polypeptide may be controlled. Furthermore, different host cells have characteristics and specific mechanisms for the translational and post-translational processing and modification (e.g., phosphorylation, cleavage) of proteins. Appropriate cell lines can be chosen to ensure the desired modifications and processing of the foreign protein expressed.

[0178] Introduction of the nucleic acids and nucleic acid constructs of the invention into the host cell can be effected by calcium phosphate transfection, DEAE-dextran mediated transfection, cationic lipid-mediated transfection, electroporation, transduction, infection, or other methods. Such methods are described in many standard laboratory manuals, such as Davis et al., Basic Methods In Molecular Biology (1986). It is specifically contemplated that the polypeptides of the present invention may in fact be expressed by a host cell lacking a recombinant vector.

[0179] In addition to encompassing host cells containing the vector constructs discussed herein, the invention also encompasses primary, secondary, and immortalized host cells of vertebrate origin, particularly mammalian origin, that have been engineered to delete or replace endogenous genetic material (e.g., colorectal cancer antigen coding sequence), and/or to include genetic material (e.g., heterologous polynucleotide sequences) that is operably associated with colorectal cancer associated polynucleotides of the invention, and which activates, alters, and/or amplifies endogenous colorectal cancer associated polynucleotides. For example, techniques known in the art may be used to operably associate heterologous control regions (e.g., promoter and/or enhancer) and endogenous colorectal cancer associated polynucleotide sequences via homologous recombination (see, e.g., US Pat. No. 5,641,670, issued Jun. 24, 1997; International Publication Number WO 96/29411; International Publication Number WO 94/12650; Koller et al., Proc. Natl. Acad. Sci. USA 86:8932-8935 (1989); and Zijlstra et al., Nature 342:435-438 (1989), the disclosures of each of which are incorporated by reference in their entireties).

[0180] Polypeptides of the present invention can also be recovered from: products purified from natural sources, including bodily fluids, tissues and cells, whether directly isolated or cultured; products of chemical synthetic procedures; and products produced by recombinant techniques from a prokaryotic or eukaryotic host, including, for example, bacterial, yeast, higher plant, insect, and mammalian cells. Depending upon the host employed in a recombinant production procedure, the polypeptides of the present invention may be glycosylated or may be non-glycosylated. In addition, polypeptides of the invention may also include an initial modified methionine residue, in some cases as a result of host-mediated processes. Thus, it is well known in the art that the N-terminal methionine encoded by the translation initiation codon generally is removed with high efficiency from any protein after translation in all eukaryotic cells. While the N-terminal methionine on most proteins also is efficiently removed in most prokaryotes, for some proteins, this prokaryotic removal process is inefficient, depending on the nature of the amino acid to which the N-terminal methionine is covalently linked.

[0181] In one embodiment, the yeast Pichia pastoris is used to express polypeptides of the invention in a eukaryotic system. Pichia pastoris is a methylotrophic yeast which can metabolize methanol as its sole carbon source. A main step in the methanol metabolization pathway is the oxidation of methanol to formaldehyde using O₂. This reaction is catalyzed by the enzyme alcohol oxidase. In order to metabolize methanol as its sole carbon source, Pichia pastoris must generate high levels of alcohol oxidase due, in part, to the relatively low affinity of alcohol oxidase for O₂. Consequently, in a growth medium depending on methanol as a main carbon source, the promoter region of one of the two alcohol oxidase genes (AOX1) is highly active. In the presence of methanol, alcohol oxidase produced from the AOX1 gene comprises up to approximately 30% of the total soluble protein in Pichia pastoris. See, Ellis, S. B., et al., Mol. Cell. Biol. 5:1111-21 (1985); Koutz, P. J, et al., Yeast 5:167-77 (1989); Tschopp, J. F., et al., Nucl. Acids Res. 15:3859-76 (1987). Thus, a heterologous coding sequence, such as, for example, a polynucleotide of the present invention, under the transcriptional regulation of all or part of the AOX1 regulatory sequence is expressed at exceptionally high levels in Pichia yeast grown in the presence of methanol.

[0182] In one example, the plasmid vector pPIC9K is used to express DNA encoding a polypeptide of the invention, as set forth herein, in a Pichea yeast system essentially as described in “Pichia Protocols: Methods in Molecular Biology,” D. R. Higgins and J. Cregg, eds. The Humana Press, Totowa, N.J., 1998. This expression vector allows expression and secretion of a polypeptide of the invention by virtue of the strong AOX1 promoter linked to the Pichia pastoris alkaline phosphatase (PHO) secretory signal peptide (i.e., leader) located upstream of a multiple cloning site.

[0183] Many other yeast vectors could be used in place of pPIC9K, such as, pYES2, pYD1, pTEF1/Zeo, pYES2/GS, pPICZ, pGAPZ, pGAPZalpha, pPIC9, pPIC3.5, pHIL-D2, pHIL-S1, pPIC3.5K, and PA0815, as one skilled in the art would readily appreciate, as long as the proposed expression construct provides appropriately located signals for transcription, translation, secretion (if desired), and the like, including an in-frame AUG as required.

[0184] In another embodiment, high-level expression of a heterologous coding sequence, such as, for example, a polynucleotide of the present invention, may be achieved by cloning the heterologous polynucleotide of the invention into an expression vector such as, for example, pGAPZ or pGAPZalpha, and growing the yeast culture in the absence of methanol.

[0185] In addition to encompassing host cells containing the vector constructs discussed herein, the invention also encompasses primary, secondary, and immortalized host cells of vertebrate origin, particularly mammalian origin, that have been engineered to delete or replace endogenous genetic material (e.g., coding sequence), and/or to include genetic material (e.g., heterologous polynucleotide sequences) that is operably associated with polynucleotides of the invention, and which activates, alters, and/or amplifies endogenous polynucleotides. For example, techniques known in the art may be used to operably associate heterologous control regions (e.g., promoter and/or enhancer) and endogenous polynucleotide sequences via homologous recombination (see, e.g., U.S. Pat. No. 5,641,670, issued Jun. 24, 1997; International Publication No. WO 96/29411, published Sep. 26, 1996; International Publication No. WO 94/12650, published Aug. 4, 1994; Koller et al., Proc. Natl. Acad. Sci. USA 86:8932-8935 (1989); and Zijlstra et al., Nature 342:435-438 (1989), the disclosures of each of which are incorporated by reference in their entireties).

[0186] In addition, polypeptides of the invention can be chemically synthesized using techniques known in the art (e.g., see Creighton, 1983, Proteins: Structures and Molecular Principles, W.H. Freeman & Co., N.Y., and Hunkapiller et al., Nature, 310:105-111 (1984)). For example, a polypeptide corresponding to a fragment of a polypeptide can be synthesized by use of a peptide synthesizer. Furthermore, if desired, nonclassical amino acids or chemical amino acid analogs can be introduced as a substitution or addition into the polypeptide sequence. Non-classical amino acids include, but are not limited to, to the D-isomers of the common amino acids, 2,4-diaminobutyric acid, a-amino isobutyric acid, 4-aminobutyric acid, Abu, 2-amino butyric acid, g-Abu, e-Ahx, 6-amino hexanoic acid, Aib, 2-amino isobutyric acid, 3-amino propionic acid, ornithine, norleucine, norvaline, hydroxyproline, sarcosine, citrulline, homocitrulline, cysteic acid, t-butylglycine, t-butylalanine, phenylglycine, cyclohexylalanine, b-alanine, fluoro-amino acids, designer amino acids such as b-methyl amino acids, Ca-methyl amino acids, Na-methyl amino acids, and amino acid analogs in general. Furthermore, the amino acid can be D (dextrorotary) or L (levorotary).

[0187] The invention encompasses polypeptides of the present invention which are differentially modified during or after translation, e.g., by glycosylation, acetylation, phosphorylation, amidation, derivatization by known protecting/blocking groups, proteolytic cleavage, linkage to an antibody molecule or other cellular ligand, etc. Any of numerous chemical modifications may be carried out by known techniques, including but not limited, to specific chemical cleavage by cyanogen bromide, trypsin, chymotrypsin, papain, V8 protease, NaBH₄; acetylation, formylation, oxidation, reduction; metabolic synthesis in the presence of tunicamycin; etc.

[0188] Additional post-translational modifications encompassed by the invention include, for example, e.g., N-linked or O-linked carbohydrate chains, processing of N-terminal or C-terminal ends), attachment of chemical moieties to the amino acid backbone, chemical modifications of N-linked or O-linked carbohydrate chains, and addition or deletion of an N-terminal methionine residue as a result of procaryotic host cell expression. The polypeptides may also be modified with a detectable label, such as an enzymatic, fluorescent, isotopic or affinity label to allow for detection and isolation of the protein.

[0189] Examples of suitable enzymes include horseradish peroxidase, alkaline phosphatase, beta-galactosidase, or acetylcholinesterase; examples of suitable prosthetic group complexes include streptavidin/biotin and avidin/biotin; examples of suitable fluorescent materials include umbelliferone, fluorescein, fluorescein isothiocyanate, rhodamine, dichlorotriazinylamine fluorescein, dansyl chloride or phycoerythrin; an example of a luminescent material includes luminol; examples of bioluminescent materials include luciferase, luciferin, and aequorin; and examples of suitable radioactive material include iodine (¹²¹I, ¹²³I, ¹²⁵I, ¹³¹I), carbon (¹⁴C), sulfur (³⁵S), tritium (³ H), indium (¹¹¹In, ¹¹²In, ^{113m}In, ^{115m}I), technetium (⁹⁹Tc, ^{99m}Tc), thallium (²⁰¹Ti), gallium (⁶⁸Ga, ⁶⁷Ga), palladium (¹⁰³Pd), molybdenum (⁹⁹Mo), xenon (¹³³Xe), fluorine (¹⁸F), ¹⁵³Sm, ¹⁷⁷Lu, ¹⁵⁹Gd, ¹⁴⁹Pm, ¹⁴⁰La, ¹⁷⁵Yb, ¹⁶⁶Ho, ⁹⁰Y, ⁴⁷SC, ¹⁸⁶Re, ¹⁸⁸Re, ¹⁴²Pr, ¹⁰⁵Rh, and ⁹⁷Ru.

[0190] In specific embodiments, a polypeptide of the present invention or fragment or variant thereof is attached to macrocyclic chelators that associate with radiometal ions, including but not limited to, ¹⁷⁷Lu, ⁹⁰Y, ¹⁶⁶Ho, and ¹⁵³Sm, to polypeptides. In a preferred embodiment, the radiometal ion associated with the macrocyclic chelators is ¹¹¹In. In another preferred embodiment, the radiometal ion associated with the macrocyclic chelator is ⁹⁰Y. In specific embodiments, the macrocyclic chelator is 1,4,7,10-tetraazacyclododecane-N,N′,N″,″′-tetraacetic acid (DOTA). In other specific embodiments, DOTA is attached to an antibody of the invention or fragment thereof via a linker molecule. Examples of linker molecules useful for conjugating DOTA to a polypeptide are commonly known in the art—see, for example, DeNardo et al., Clin Cancer Res. 4(10):2483-90 (1998); Peterson et al., Bioconjug. Chem. 10(4):553-7 (1999); and Zimmerman et al, Nucl. Med. Biol. 26(8):943-50 (1999); which are hereby incorporated by reference in their entirety.

[0191] As mentioned, the colorectal cancer associated proteins of the invention may be modified by either natural processes, such as posttranslational processing, or by chemical modification techniques which are well known in the art. It will be appreciated that the same type of modification may be present in the same or varying degrees at several sites in a given colorectal cancer associated polypeptide. Colorectal cancer associated polypeptides may be branched, for example, as a result of ubiquitination, and they may be cyclic, with or without branching. Cyclic, branched, and branched cyclic colorectal cancer associated polypeptides may result from posttranslation natural processes or may be made by synthetic methods. Modifications include acetylation, acylation, ADP-ribosylation, amidation, covalent attachment of flavin, covalent attachment of a heme moiety, covalent attachment of a nucleotide or nucleotide derivative, covalent attachment of a lipid or lipid derivative, covalent attachment of phosphotidylinositol, cross-linking, cyclization, disulfide bond formation, demethylation, formation of covalent cross-links, formation of cysteine, formation of pyroglutarnate, formylation, gamma-carboxylation, glycosylation, GPI anchor formation, hydroxylation, iodination, methylation, myristoylation, oxidation, pegylation, proteolytic processing, phosphorylation, prenylation, racemization, selenoylation, sulfation, transfer-RNA mediated addition of amino acids to proteins such as arginylation, and ubiquitination. (See, for instance, PROTEINS—STRUCTURE AND MOLECULAR PROPERTIES, 2nd Ed., T. E. Creighton, W. H. Freeman and Company, New York (1993); POSTTRANSLATIONAL COVALENT MODIFICATION OF PROTEINS, B. C. Johnson, Ed., Academic Press, New York, pgs. 1-12 (1983); Seifter et al., Meth. Enzymol. 182:626-646 (1990); Rattan et al., Ann. N.Y. Acad. Sci. 663:48-62 (1992)).

[0192] Also provided by the invention are chemically modified derivatives of the polypeptides of the invention which may provide additional advantages such as increased solubility, stability and circulating time of the polypeptide, or decreased immunogenicity (see U.S. Pat. No. 4,179,337). The chemical moieties for derivitization may be selected from water soluble polymers such as polyethylene glycol, ethylene glycol/propylene glycol copolymers, carboxymethylcellulose, dextran, polyvinyl alcohol and the like. The polypeptides may be modified at random positions within the molecule, or at predetermined positions within the molecule and may include one, two, three or more attached chemical moieties.

[0193] The polymer may be of any molecular weight, and may be branched or unbranched. For polyethylene glycol, the preferred molecular weight is between about 1 kDa and about 100 kDa (the term “about” indicating that in preparations of polyethylene glycol, some molecules will weigh more, some less, than the stated molecular weight) for ease in handling and manufacturing. Other sizes may be used, depending on the desired therapeutic profile (e.g., the duration of sustained release desired, the effects, if any on biological activity, the ease in handling, the degree or lack of antigenicity and other known effects of the polyethylene glycol to a therapeutic protein or analog). For example, the polyethylene glycol may have an average molecular weight of about 200, 500, 1000, 1500, 2000, 2500, 3000, 3500, 4000, 4500, 5000, 5500, 6000, 6500, 7000, 7500, 8000, 8500, 9000, 9500, 10,000, 10,500, 11,000, 11,500, 12,000, 12,500, 13,000, 13,500, 14,000, 14,500, 15,000, 15,500, 16,000, 16,500, 17,000, 17,500, 18,000, 18,500, 19,000, 19,500, 20,000, 25,000, 30,000, 35,000, 40,000, 50,000, 55,000, 60,000, 65,000, 70,000, 75,000, 80,000, 85,000, 90,000, 95,000, or 100,000 kDa.

[0194] As noted above, the polyethylene glycol may have a branched structure. Branched polyethylene glycols are described, for example, in U.S. Patent No. 5,643,575; Morpurgo et al., Appl. Biochem. Biotechnol. 56:59-72 (1996); Vorobjev et al., Nucleosides Nucleotides 18:2745-2750 (1999); and Caliceti et al., Bioconjug. Chem. 10:638-646 (1999), the disclosures of each of which are incorporated herein by reference.

[0195] The polyethylene glycol molecules (or other chemical moieties) should be attached to the protein with consideration of effects on functional or antigenic domains of the protein. There are a number of attachment methods available to those skilled in the art, such as, for example, the method disclosed in EP 0 401 384 (coupling PEG to G-CSF), herein incorporated by reference; see also Malik et al., Exp. Hematol. 20:1028-1035 (1992), reporting pegylation of GM-CSF using tresyl chloride. For example, polyethylene glycol may be covalently bound through amino acid residues via a reactive group, such as a free amino or carboxyl group. Reactive groups are those to which an activated polyethylene glycol molecule may be bound. The amino acid residues having a free amino group may include lysine residues and the N-terminal amino acid residues; those having a free carboxyl group may include aspartic acid residues glutamic acid residues and the C-terminal amino acid residue. Sulfhydryl groups may also be used as a reactive group for attaching the polyethylene glycol molecules. Preferred for therapeutic purposes is attachment at an amino group, such as attachment at the N-terminus or lysine group.

[0196] As suggested above, polyethylene glycol may be attached to proteins via linkage to any of a number of amino acid residues. For example, polyethylene glycol can be linked to proteins via covalent bonds to lysine, histidine, aspartic acid, glutamic acid, or cysteine residues. One or more reaction chemistries may be employed to attach polyethylene glycol to specific amino acid residues (e.g., lysine, histidine, aspartic acid, glutamic acid, or cysteine) of the protein or to more than one type of amino acid residue (e.g., lysine, histidine, aspartic acid, glutamic acid, cysteine and combinations thereof) of the protein.

[0197] One may specifically desire proteins chemically modified at the N-terminus. Using polyethylene glycol as an illustration of the present composition, one may select from a variety of polyethylene glycol molecules (by molecular weight, branching, etc.), the proportion of polyethylene glycol molecules to protein (polypeptide) molecules in the reaction mix, the type of pegylation reaction to be performed, and the method of obtaining the selected N-terminally pegylated protein. The method of obtaining the N-terminally pegylated preparation (i.e., separating this moiety from other monopegylated moieties if necessary) may be by purification of the N-terminally pegylated material from a population of pegylated protein molecules. Selective proteins chemically modified at the N-terminus modification may be accomplished by reductive alkylation which exploits differential reactivity of different types of primary amino groups (lysine versus the N-terminal) available for derivatization in a particular protein. Under the appropriate reaction conditions, substantially selective derivatization of the protein at the N-terminus with a carbonyl group containing polymer is achieved.

[0198] As indicated above, pegylation of the proteins of the invention may be accomplished by any number of means. For example, polyethylene glycol may be attached to the protein either directly or by an intervening linker. Linkerless systems for attaching polyethylene glycol to proteins are described in Delgado et al., Crit. Rev. Thera. Drug Carrier Sys. 9:249-304 (1992); Francis et al., Intern. J. of Hematol. 68: 1-18 (1998); U.S. Pat. No. 4,002,531; U.S. Pat. No. 5,349,052; WO 95/06058; and WO 98/32466, the disclosures of each of which are incorporated herein by reference.

[0199] One system for attaching polyethylene glycol directly to amino acid residues of proteins without an intervening linker employs tresylated MPEG, which is produced by the modification of monmethoxy polyethylene glycol (MPEG) using tresylchloride (CISO₂CH₂CF₃). Upon reaction of protein with tresylated MPEG, polyethylene glycol is directly attached to amine groups of the protein. Thus, the invention includes protein-polyethylene glycol conjugates produced by reacting proteins of the invention with a polyethylene glycol molecule having a 2,2,2-trifluoreothane sulphonyl group.

[0200] Polyethylene glycol can also be attached to proteins using a number of different intervening linkers. For example, U.S. Pat. No. 5,612,460, the entire disclosure of which is incorporated herein by reference, discloses urethane linkers for connecting polyethylene glycol to proteins. Protein-polyethylene glycol conjugates wherein the polyethylene glycol is attached to the protein by a linker can also be produced by reaction of proteins with compounds such as MPEG-succinimidylsuccinate, MPEG activated with 1,1′-carbonyldiimidazole, MPEG-2,4,5-trichloropenylcarbonate, MPEG-p-nitrophenolcarbonate, and various MPEG-succinate derivatives. A number of additional polyethylene glycol derivatives and reaction chemistries for attaching polyethylene glycol to proteins are described in International Publication No. WO 98/32466, the entire disclosure of which is incorporated herein by reference. Pegylated protein products produced using the reaction chemistries set out herein are included within the scope of the invention.

[0201] The number of polyethylene glycol moieties attached to each protein of the invention (i.e., the degree of substitution) may also vary. For example, the pegylated proteins of the invention may be linked, on average, to 1, 2, 3, 4, 5, 6, 7, 8, 9, 10, 12, 15, 17, 20, or more polyethylene glycol molecules. Similarly, the average degree of substitution within ranges such as 1-3, 2-4, 3-5, 4-6, 5-7, 6-8, 7-9, 8-10, 9-11, 10-12, 11-13, 12-14, 13-15, 14-16, 15-17, 16-18, 17-19, or 18-20 polyethylene glycol moieties per protein molecule. Methods for determining the degree of substitution are discussed, for example, in Delgado et al., Crit. Rev. Thera. Drug Carrier Sys. 9:249-304 (1992).

[0202] The colorectal cancer associated polypeptides of the invention can be recovered and purified from chemical synthesis and recombinant cell cultures by standard methods which include, but are not limited to, ammonium sulfate or ethanol precipitation, acid extraction, anion or cation exchange chromatography, phosphocellulose chromatography, hydrophobic interaction chromatography, affinity chromatography, hydroxylapatite chromatography and lectin chromatography. Most preferably, high performance liquid chromatography (“HPLC”) is employed for purification. Well known techniques for refolding protein may be employed to regenerate active conformation when the polypeptide is denatured during isolation and/or purification.

[0203] Colorectal cancer associated polynucleotides and polypeptides may be used in accordance with the present invention for a variety of applications, particularly those that make use of the chemical and biological properties of colorectal cancer associated antigens. Among these are applications in the detection, prevention, diagnosis and/or treatment of diseases associated with the colon and/or rectum, such as e.g., colorectal cancer, tumors, colon cancer, adenomatous colon polyps (e.g., villous adenoma), colon carcinoma, colorectal cancer, and/or as described under “Gastrointestinal Disorders” below. Additional applications relate to diagnosis and to treatment of disorders of cells, tissues and organisms. These aspects of the invention are discussed further below.

[0204] In a preferred embodiment, polynucleotides expressed in a particular tissue type are used to detect, diagnose, treat, prevent and/or prognose disorders associated with the tissue type.

[0205] The polypeptides of the invention may be in monomers or multimers (i.e., dimers, trimers, tetramers and higher multimers). Accordingly, the present invention relates to monomers and multimers of the polypeptides of the invention, their preparation, and compositions (preferably, Therapeutics) containing them. In specific embodiments, the polypeptides of the invention are monomers, dimers, trimers or tetramers. In additional embodiments, the multimers of the invention are at least dimers, at least trimers, or at least tetramers.

[0206] Multimers encompassed by the invention may be homomers or heteromers. As used herein, the term homomer refers to a multimer containing only polypeptides corresponding to a protein of the invention (e.g., the amino acid sequence of SEQ ID NO:Y, an amino acid sequence encoded by SEQ ID NO:X or the complement of SEQ ID NO:X, the amino acid sequence encoded by the portion of SEQ ID NO:X as defined in columns 8 and 9 of Table 2, and/or an amino acid sequence encoded by cDNA contained in Clone ID NO:Z (including fragments, variants, splice variants, and fusion proteins, corresponding to these as described herein)). These homomers may contain polypeptides having identical or different amino acid sequences. In a specific embodiment, a homomer of the invention is a multimer containing only polypeptides having an identical amino acid sequence. In another specific embodiment, a homomer of the invention is a multimer containing polypeptides having different amino acid sequences. In specific embodiments, the multimer of the invention is a homodimer (e.g., containing two polypeptides having identical or different amino acid sequences) or a homotrimer (e.g., containing three polypeptides having identical and/or different amino acid sequences). In additional embodiments, the homomeric multimer of the invention is at least a homodimer, at least a homotrimer, or at least a homotetramer.

[0207] As used herein, the term heteromer refers to a multimer containing two or more heterologous polypeptides (i.e., polypeptides of different proteins) in addition to the polypeptides of the invention. In a specific embodiment, the multimer of the invention is a heterodimer, a heterotrimer, or a heterotetramer. In additional embodiments, the heteromeric multimer of the invention is at least a heterodimer, at least a heterotrimer, or at least a heterotetramer.

[0208] Multimers of the invention may be the result of hydrophobic, hydrophilic, ionic and/or covalent associations and/or may be indirectly linked by, for example, liposome formation. Thus, in one embodiment, multimers of the invention, such as, for example, homodimers or homotrimers, are formed when polypeptides of the invention contact one another in solution. In another embodiment, heteromultimers of the invention, such as, for example, heterotrimers or heterotetramers, are formed when polypeptides of the invention contact antibodies to the polypeptides of the invention (including antibodies to the heterologous polypeptide sequence in a fusion protein of the invention) in solution. In other embodiments, multimers of the invention are formed by covalent associations with and/or between the polypeptides of the invention. Such covalent associations may involve one or more amino acid residues contained in the polypeptide sequence (e.g., that recited in SEQ ID NO:Y, encoded by the portion of SEQ ID NO:X as defined in columns 8 and 9 of Table 2, and/or encoded by the cDNA contained in Clone ID NO:Z). In one instance, the covalent associations are cross-linking between cysteine residues located within the polypeptide sequences which interact in the native (i.e., naturally occurring) polypeptide. In another instance, the covalent associations are the consequence of chemical or recombinant manipulation. Alternatively, such covalent associations may involve one or more amino acid residues contained in the heterologous polypeptide sequence in a fusion protein. In one example, covalent associations are between the heterologous sequence contained in a fusion protein of the invention (see, e.g., U.S. Pat. No. 5,478,925). In a specific example, the covalent associations are between the heterologous sequence contained in a Fc fusion protein of the invention (as described herein). In another specific example, covalent associations of fusion proteins of the invention are between heterologous polypeptide sequence from another protein that is capable of forming covalently associated multimers, such as for example, osteoprotegerin (see, e.g., International Publication NO: WO 98/49305, the contents of which are herein incorporated by reference in its entirety). In another embodiment, two or more polypeptides of the invention are joined through peptide linkers. Examples include those peptide linkers described in U.S. Pat. No. 5,073,627 (hereby incorporated by reference). Proteins comprising multiple polypeptides of the invention separated by peptide linkers may be produced using conventional recombinant DNA technology.

[0209] Another method for preparing multimer polypeptides of the invention involves use of polypeptides of the invention fused to a leucine zipper or isoleucine zipper polypeptide sequence. Leucine zipper and isoleucine zipper domains are polypeptides that promote multimerization of the proteins in which they are found. Leucine zippers were originally identified in several DNA-binding proteins (Landschulz et al., Science 240:1759, (1988)), and have since been found in a variety of different proteins. Among the known leucine zippers are naturally occurring peptides and derivatives thereof that dimerize or trimerize. Examples of leucine zipper domains suitable for producing soluble multimeric proteins of the invention are those described in PCT application WO 94/10308, hereby incorporated by reference. Recombinant fusion proteins comprising a polypeptide of the invention fused to a polypeptide sequence that dimerizes or trimerizes in solution are expressed in suitable host cells, and the resulting soluble multimeric fusion protein is recovered from the culture supernatant using techniques known in the art.

[0210] Trimeric polypeptides of the invention may offer the advantage of enhanced biological activity. Preferred leucine zipper moieties and isoleucine moieties are those that preferentially form trimers. One example is a leucine zipper derived from lung surfactant protein D (SPD), as described in Hoppe et al. (FEBS Letters 344:191, (1994)) and in U.S. patent application Ser. No. 08/446,922, hereby incorporated by reference. Other peptides derived from naturally occurring trimeric proteins may be employed in preparing trimeric polypeptides of the invention.

[0211] In another example, proteins of the invention are associated by interactions between Flag® polypeptide sequence contained in fusion proteins of the invention containing Flag® polypeptide sequence. In a further embodiment, proteins of the invention are associated by interactions between heterologous polypeptide sequence contained in Flag® fusion proteins of the invention and anti-Flag® antibody.

[0212] The multimers of the invention may be generated using chemical techniques known in the art. For example, polypeptides desired to be contained in the multimers of the invention may be chemically cross-linked using linker molecules and linker molecule length optimization techniques known in the art (see, e.g., U.S. Pat. No. 5,478,925, which is herein incorporated by reference in its entirety). Additionally, multimers of the invention may be generated using techniques known in the art to form one or more inter-molecule cross-links between the cysteine residues located within the sequence of the polypeptides desired to be contained in the multimer (see, e.g., U.S. Pat. No. 5,478,925, which is herein incorporated by reference in its entirety). Further, polypeptides of the invention may be routinely modified by the addition of cysteine or biotin to the C-terminus or N-terminus of the polypeptide and techniques known in the art may be applied to generate multimers containing one or more of these modified polypeptides (see, e.g., U.S. Pat. No. 5,478,925, which is herein incorporated by reference in its entirety). Additionally, techniques known in the art may be applied to generate liposomes containing the polypeptide components desired to be contained in the multimer of the invention (see, e.g., U.S. Pat. No. 5,478,925, which is herein incorporated by reference in its entirety).

[0213] Alternatively, multimers of the invention may be generated using genetic engineering techniques known in the art. In one embodiment, polypeptides contained in multimers of the invention are produced recombinantly using fusion protein technology described herein or otherwise known in the art (see, e.g., U.S. Pat. No. 5,478,925, which is herein incorporated by reference in its entirety). In a specific embodiment, polynucleotides coding for a homodimer of the invention are generated by ligating a polynucleotide sequence encoding a polypeptide of the invention to a sequence encoding a linker polypeptide and then further to a synthetic polynucleotide encoding the translated product of the polypeptide in the reverse orientation from the original C-terminus to the N-terminus (lacking the leader sequence) (see, e.g., U.S. Pat. No. 5,478,925, which is herein incorporated by reference in its entirety). In another embodiment, recombinant techniques described herein or otherwise known in the art are applied to generate recombinant polypeptides of the invention which contain a transmembrane domain (or hydrophobic or signal peptide) and which can be incorporated by membrane reconstitution techniques into liposomes (see, e.g., U.S. Pat. No. 5,478,925, which is herein incorporated by reference in its entirety).

[0214] Antibodies

[0215] Further polypeptides of the invention relate to antibodies and T-cell antigen receptors (TCR) which immunospecifically bind a polypeptide, polypeptide fragment, or variant of the invention (e.g., a polypeptide or fragment or variant of the amino acid sequence of SEQ ID NO:Y or a polypeptide encoded by the cDNA contained in Clone ID NO:Z, and/or an epitope, of the present invention) as determined by immunoassays well known in the art for assaying specific antibody-antigen binding. Antibodies of the invention include, but are not limited to, polyclonal, monoclonal, multispecific, human, humanized or chimeric antibodies, single chain antibodies, Fab fragments, F(ab′) fragments, fragments produced by a Fab expression library, anti-idiotypic (anti-Id) antibodies (including, e.g., anti-Id antibodies to antibodies of the invention), intracellularly-made antibodies (i.e., intrabodies), and epitope-binding fragments of any of the above. The term “antibody,” as used herein, refers to immunoglobulin molecules and immunologically active portions of immunoglobulin molecules, i.e., molecules that contain an antigen binding site that immunospecifically binds an antigen. The immunoglobulin molecules of the invention can be of any type (e.g., IgG, IgE, IgM, IgD, IgA and IgY), class (e.g., IgG1, IgG2, IgG3, IgG4, IgA1 and IgA2) or subclass of immunoglobulin molecule. In preferred embodiments, the immunoglobulin molecules of the invention are IgG1. In other preferred embodiments, the immunoglobulin molecules of the invention are IgG4.

[0216] Most preferably the antibodies are human antigen-binding antibody fragments of the present invention and include, but are not limited to, Fab, Fab′ and F(ab′)2, Fd, single-chain Fvs (scFv), single-chain antibodies, disulfide-linked Fvs (sdFv) and fragments comprising either a VL or VH domain. Antigen-binding antibody fragments, including single-chain antibodies, may comprise the variable region(s) alone or in combination with the entirety or a portion of the following: hinge region, CH1, CH2, and CH3 domains. Also included in the invention are antigen-binding fragments also comprising any combination of variable region(s) with a hinge region, CH1, CH2, and CH3 domains. The antibodies of the invention may be from any animal origin including birds and mammals. Preferably, the antibodies are human, murine (e.g., mouse and rat), donkey, ship rabbit, goat, guinea pig, camel, horse, or chicken. As used herein, “human” antibodies include antibodies having the amino acid sequence of a human immunoglobulin and include antibodies isolated from human immunoglobulin libraries or from animals transgenic for one or more human immunoglobulin and that do not express endogenous immunoglobulins, as described infra and, for example in, U.S. Pat. No. 5,939,598 by Kucherlapati et al.

[0217] The antibodies of the present invention may be monospecific, bispecific, trispecific or of greater multispecificity. Multispecific antibodies may be specific for different epitopes of a polypeptide of the present invention or may be specific for both a polypeptide of the present invention as well as for a heterologous epitope, such as a heterologous polypeptide or solid support material. See, e.g., PCT publications WO 93/17715; WO 92/08802; WO 91/00360; WO 92/05793; Tutt, et al., J. Immunol. 147:60-69 (1991); U.S. Pat. Nos. 4,474,893; 4,714,681; 4,925,648; 5,573,920; 5,601,819; Kostelny et al., J. Immunol. 148:1547-1553 (1992).

[0218] Antibodies of the present invention may be described or specified in terms of the epitope(s) or portion(s) of a polypeptide of the present invention which they recognize or specifically bind. The epitope(s) or polypeptide portion(s) may be specified as described herein, e.g., by N-terminal and C-terminal positions, or by size in contiguous amino acid residues, or listed in the Tables and Figures. Preferred epitopes of the invention include those shown in column 6 of Table 1A, as well as polynucleotides that encode these epitopes. Antibodies, which specifically bind any epitope or polypeptide of the present invention may also be excluded. Therefore, the present invention includes antibodies that specifically bind polypeptides of the present invention, and allows for the exclusion of the same.

[0219] Antibodies of the present invention may also be described or specified in terms of their cross-reactivity. Antibodies that do not bind any other analog, ortholog, or homolog of a polypeptide of the present invention are included. Antibodies that bind polypeptides with at least 95%, at least 90%, at least 85%, at least 80%, at least 75%, at least 70%, at least 65%, at least 60%, at least 55%, and at least 50% identity (as calculated using methods known in the art and described herein) to a polypeptide of the present invention are also included in the present invention. In specific embodiments, antibodies of the present invention cross-react with murine, rat and/or rabbit homologs of human proteins and the corresponding epitopes thereof. Antibodies that do not bind polypeptides with less than 95%, less than 90%, less than 85%, less than 80%, less than 75%, less than 70%, less than 65%, less than 60%, less than 55%, and less than 50% identity (as calculated using methods known in the art and described herein) to a polypeptide of the present invention are also included in the present invention. In a specific embodiment, the above-described cross-reactivity is with respect to any single specific antigenic or immunogenic polypeptide, or combination(s) of 2, 3, 4, 5, or more of the specific antigenic and/or immunogenic polypeptides disclosed herein. Further included in the present invention are antibodies which bind polypeptides encoded by polynucleotides which hybridize to a polynucleotide of the present invention under stringent hybridization conditions (as described herein). Antibodies of the present invention may also be described or specified in terms of their binding affinity to a polypeptide of the invention. Preferred binding affinities include those with a dissociation constant or Kd less than 5×10⁻² M, 10⁻² M, 5×10⁻³ M, 10⁻³ M, 5×10⁻⁴ M, 10⁻⁴ M, 5×10⁻⁵ M, 10⁻⁵ M, 5×10⁻⁶ M, 10⁻⁶M, 5×10⁻⁷ M, 10⁻⁷ M, 5×10⁻⁸ M, 10⁻⁸ M, 5×10⁻⁹ M, 10⁻⁹ M, 5×10⁻¹⁰ M, 10⁻¹⁰ M, 5×10⁻¹¹ M, 10⁻¹¹ M, 5×10⁻¹² M, 10⁻¹² M, 5×10⁻¹³ M, 10⁻¹³ M, 5×10⁻¹⁴ M, 10⁻¹⁴ M, 5×10⁻¹⁵ M, or 10⁻¹⁵ M.

[0220] The invention also provides antibodies that competitively inhibit binding of an antibody to an epitope of the invention as determined by any method known in the art for determining competitive binding, for example, the immunoassays described herei-n. In preferred embodiments, the antibody competitively inhibits binding to the epitope by at least 95%, at least 90%, at least 85 %, at least 80%, at least 75%, at least 70%, at least 60%, or at least 50%.

[0221] Antibodies of the present invention may act as agonists or antagonists of the polypeptides of the present invention. For example, the present invention includes antibodies which disrupt the receptor/ligand interactions with the polypeptides of the invention either partially or fully. Preferably, antibodies of the present invention bind an antigenic epitope disclosed herein, or a portion thereof. The invention features both receptor-specific antibodies and ligand-specific antibodies. The invention also features receptor-specific antibodies, which do not prevent ligand binding but prevent receptor activation. Receptor activation (i.e., signaling) may be determined by techniques described herein or otherwise known in the art. For example, receptor activation can be determined by detecting the phosphorylation (e.g., tyrosine or serine/threonine) of the receptor or its substrate by immunoprecipitation followed by western blot analysis (for example, as described supra). In specific embodiments, antibodies are provided that inhibit ligand activity or receptor activity by at least 95%, at least 90%, at least 85%, at least 80%, at least 75%, at least 70%, at least 60%, or at least 50% of the activity in absence of the antibody.

[0222] The invention also features receptor-specific antibodies which both prevent ligand binding and receptor activation as well as antibodies that recognize the receptor-ligand complex, and, preferably, do not specifically recognize the unbound receptor or the unbound ligand. Likewise, included in the invention are neutralizing antibodies which bind the ligand and prevent binding of the ligand to the receptor, as well as antibodies which bind the ligand, thereby preventing receptor activation, but do not prevent the ligand from binding the receptor. Further included in the invention are antibodies, which activate the receptor. These antibodies may act as receptor agonists, i.e., potentiate or activate either all or a subset of the biological activities of the ligand-mediated receptor activation, for example, by inducing dimerization of the receptor. The antibodies may be specified as agonists, antagonists or inverse agonists for biological activities comprising the specific biological activities of the peptides of the invention disclosed herein. The above antibody agonists can be made using methods known in the art. See, e.g., PCT publication WO 96/40281; U.S. Pat. No. 5,811,097; Deng et al., Blood 92(6):1981-1988 (1998); Chen et al., Cancer Res. 58(16):3668-3678 (1998); Harrop et al., J. Immunol. 161(4):1786-1794 (1998); Zhu et al., Cancer Res. 58(15):3209-3214 (1998); Yoon et al., J. Immunol. 160(7):3170-3179 (1998); Prat et al., J. Cell. Sci. lll(Pt2):237-247 (1998); Pitard et al., J. Immunol. Methods 205(2):177-190 (1997); Liautard et al., Cytokine 9(4):233-241 (1997); Carlson et al., J. Biol. Chem. 272(17):11295-11301 (1997); Taryman et al., Neuron 14(4):755-762 (1995); Muller et al., Structure 6(9):1153-1167 (1998); Bartunek et al., Cytokine 8(1):14-20 (1996) (which are all incorporated by reference herein in their entireties).

[0223] Antibodies of the present invention may be used, for example, to purify, detect, and target the polypeptides of the present invention, including both in vitro and in vivo diagnostic and therapeutic methods. For example, the antibodies have utility in immunoassays for qualitatively and quantitatively measuring levels of the polypeptides of the present invention in biological samples. See, e.g., Harlow et al., Antibodies: A Laboratory Manual, (Cold Spring Harbor Laboratory Press, 2nd ed. 1988); incorporated by reference herein in its entirety.

[0224] As discussed in more detail below, the antibodies of the present invention may be used either alone or in combination with other compositions. The antibodies may further be recombinantly fused to a heterologous polypeptide at the N- or C-terminus or chemically conjugated (including covalent and non-covalent conjugations) to polypeptides or other compositions. For example, antibodies of the present invention may be recombinantly fused or conjugated to molecules useful as labels in detection assays and effector molecules such as heterologous polypeptides, drugs, radionuclides, or toxins. See, e.g., PCT publications WO 92/08495; WO 91/14438; WO 89/12624; U.S. Pat. No. 5,314,995; and EP 396,387; the disclosures of which are incorporated herein by reference in their entireties.

[0225] The antibodies of the invention include derivatives that are modified, i.e., by the covalent attachment of any type of molecule to the antibody such that covalent attachment does not prevent the antibody from generating an anti-idiotypic response. For example, but not by way of limitation, the antibody derivatives include antibodies that have been modified, e.g., by glycosylation, acetylation, pegylation, phosphylation, amidation, derivatization by known protecting/blocking groups, proteolytic cleavage, linkage to a cellular ligand or other protein, etc. Any of numerous chemical modifications may be carried out by known techniques, including, but not limited to specific chemical cleavage, acetylation, formylation, metabolic synthesis of tunicamycin, etc. Additionally, the derivative may contain one or more non-classical amino acids.

[0226] The antibodies of the present invention may be generated by any suitable method known in the art. Polyclonal antibodies to an antigen-of-interest can be produced by various procedures well known in the art. For example, a polypeptide of the invention can be administered to various host animals including, but not limited to, rabbits, mice, rats, etc. to induce the production of sera containing polyclonal antibodies specific for the antigen. Various adjuvants may be used to increase the immunological response, depending on the host species, and include but are not limited to, Freund's (complete and incomplete), mineral gels such as aluminum hydroxide, surface active substances such as lysolecithin, pluronic polyols, polyanions, peptides, oil emulsions, keyhole limpet hemocyanins, dinitrophenol, and potentially useful human adjuvants such as BCG (bacille Calmette-Guerin) and corynebacterium parvum. Such adjuvants are also well known in the art.

[0227] Monoclonal antibodies can be prepared using a wide variety of techniques known in the art including the use of hybridoma, recombinant, and phage display technologies, or a combination thereof. For example, monoclonal antibodies can be produced using hybridoma techniques including those known in the art and taught, for example, in Harlow et al., Antibodies: A Laboratory Manual, (Cold Spring Harbor Laboratory Press, 2nd ed. 1988); Hammerling, et al., in: Monoclonal Antibodies and T-Cell Hybridomas 563-681 (Elsevier, N.Y., 1981) (said references incorporated by reference in their entireties). The term “monoclonal antibody” as used herein is not limited to antibodies produced through hybridoma technology. The term “monoclonal antibody” refers to an antibody that is derived from a single clone, including any eukaryotic, prokaryotic, or phage clone, and not the method by which it is produced.

[0228] Methods for producing and screening for specific antibodies using hybridoma technology are routine and well known in the art and are discussed in detail in the Examples. In a non-limiting example, mice can be immunized with a polypeptide of the invention or a cell expressing such peptide. Once an immune response is detected, e.g., antibodies specific for the antigen are detected in the mouse serum, the mouse spleen is harvested and splenocytes isolated. The splenocytes are then fused by well known techniques to any suitable myeloma cells, for example cells from cell line SP20 available from the ATCC. Hybridomas are selected and cloned by limited dilution. The hybridoma clones are then assayed by methods known in the art for cells that secrete antibodies capable of binding a polypeptide of the invention. Ascites fluid, which generally contains high levels of antibodies, can be generated by immunizing mice with positive hybridoma clones.

[0229] Accordingly, the present invention provides methods of generating monoclonal antibodies as well as antibodies produced by the method comprising culturing a hybridoma cell secreting an antibody of the invention wherein, preferably, the hybridoma is generated by fusing splenocytes isolated from a mouse immunized with an antigen of the invention with myeloma cells and then screening the hybridomas resulting from the fusion for hybridoma clones that secrete an antibody able to bind a polypeptide of the invention.

[0230] Another well known method for producing both polyclonal and monoclonal human B cell lines is transformation using Epstein Barr Virus (EBV). Protocols for generating EBV-transformed B cell lines are commonly known in the art, such as, for example, the protocol outlined in Chapter 7.22 of Current Protocols in Immunology, Coligan et al., Eds., 1994, John Wiley & Sons, NY, which is hereby incorporated in its entirety by reference herein. The source of B cells for transformation is commonly human peripheral blood, but B cells for transformation may also be derived from other sources including, but not limited to, lymph nodes, tonsil, spleen, tumor tissue, and infected tissues. Tissues are generally made into single cell suspensions prior to EBV transformation. Additionally, steps may be taken to either physically remove or inactivate T cells (e.g., by treatment with cyclosporin A) in B cell-containing samples, because T cells from individuals seropositive for anti-EBV antibodies can suppress B cell immortalization by EBV.

[0231] In general, the sample containing human B cells is innoculated with EBV, and cultured for 3-4 weeks. A typical source of EBV is the culture supernatant of the B95-8 cell line (ATCC #VR-1492). Physical signs of EBV transformation can generally be seen towards the end of the 3-4 week culture period. By phase-contrast microscopy, transformed cells may appear large, clear, hairy and tend to aggregate in tight clusters of cells. Initially, EBV lines are generally polyclonal. However, over prolonged periods of cell cultures, EBV lines may become monoclonal or polyclonal as a result of the selective outgrowth of particular B cell clones. Alternatively, polyclonal EBV transformed lines may be subcloned (e.g., by limiting dilution culture) or fused with a suitable fusion partner and plated at limiting dilution to obtain monoclonal B cell lines. Suitable fusion partners for EBV transformed cell lines include mouse myeloma cell lines (e.g., SP2/0, X63-Ag8.653), heteromyeloma cell lines (human x mouse; e.g, SPAM-8, SBC-H20, and CB-F7), and human cell lines (e.g., GM 1500, SKO-007, RPMI 8226, and KR-4). Thus, the present invention also provides a method of generating polyclonal or monoclonal human antibodies against polypeptides of the invention or fragments thereof, comprising EBV-transformation of human B cells.

[0232] Antibody fragments, which recognize specific epitopes may be generated by known techniques. For example, Fab and F(ab′)2 fragments of the invention may be produced by proteolytic cleavage of immunoglobulin molecules, using enzymes such as papain (to produce Fab fragments) or pepsin (to produce F(ab′)2 fragments). F(ab′)2 fragments contain the variable region, the light chain constant region and the CH1 domain of the heavy chain. For example, the antibodies of the present invention can also be generated using various phage display methods known in the art and as discussed in detail in the Examples (e.g., Example 10). In phage display methods, functional antibody domains are displayed on the surface of phage particles, which carry the polynucleotide sequences encoding them. In a particular embodiment, such phage can be utilized to display antigen binding domains expressed from a repertoire or combinatorial antibody library (e.g., human or murine). Phage expressing an antigen binding domain that binds the antigen of interest can be selected or identified with antigen, e.g., using labeled antigen or antigen bound or captured to a solid surface or bead. Phage used in these methods are typically filamentous phage including fd and M13 binding domains expressed from phage with Fab, Fv or disulfide stabilized Fv antibody domains recombinantly fused to either the phage gene III or gene VIII protein. Examples of phage display methods that can be used to make the antibodies of the present invention include those disclosed in Brinkman et al., J. Immunol. Methods 182:41-50 (1995); Ames et al., J. Immunol. Methods 184:177-186 (1995); Kettleborough et al., Eur. J. Immunol. 24:952-958 (1994); Persic et al., Gene 187 9-18 (1997); Burton et al., Advances in Immunology 57:191-280 (1994); PCT application No. PCT/GB91/01134; PCT publications WO 90/02809; WO 91/10737; WO 92/01047; WO 92/18619; WO 93/11236; WO 95/15982; WO 95/20401; and U.S. Pat. Nos. 5,698,426; 5,223,409; 5,403,484; 5,580,717; 5,427,908; 5,750,753; 5,821,047; 5,571,698; 5,427,908; 5,516,637; 5,780,225; 5,658,727; 5,733,743 and 5,969,108; each of which is incorporated herein by reference in its entirety.

[0233] As described in the above references, after phage selection, the antibody coding regions from the phage can be isolated and used to generate whole antibodies, including human antibodies, or any other desired antigen binding fragment, and expressed in any desired host, including mammalian cells, insect cells, plant cells, yeast, and bacteria, e.g., as described in detail below. For example, techniques to recombinantly produce Fab, Fab′ and F(ab′)2 fragments can also be employed using methods known in the art such as those disclosed in PCT publication WO 92/22324; Mullinax et al., BioTechniques 12(6):864-869 (1992); and Sawai et al., AJRI 34:26-34 (1995); and Better et al., Science 240:1041-1043 (1988) (said references incorporated by reference in their entireties).

[0234] Examples of techniques which can be used to produce single-chain Fvs and antibodies include those described in U.S. Pat. Nos. 4,946,778 and 5,258,498; Huston et al., Methods in Enzymology 203:46-88 (1991); Shu et al., PNAS 90:7995-7999 (1993); and Skerra et al., Science 240:1038-1040 (1988). For some uses, including in vivo use of antibodies in humans and in vitro detection assays, it may be preferable to use chimeric, humanized, or human antibodies. A chimeric antibody is a molecule in which different portions of the antibody are derived from different animal species, such as antibodies having a variable region derived from a murine monoclonal antibody and a human immunoglobulin constant region. Methods for producing chimeric antibodies are known in the art. See e.g., Morrison, Science 229:1202 (1985); Oi et al., BioTechniques 4:214 (1986); Gillies et al., (1989) J. Immunol. Methods 125:191-202; U.S. Patent Nos. 5,807,715; 4,816,567; and 4,816397, which are incorporated herein by reference in their entirety. Humanized antibodies are antibody molecules from non-human species antibody that binds the desired antigen having one or more complementarity determining regions (CDRs) from the non-human species and a framework regions from a human immunoglobulin molecule. Often, framework residues in the human framework regions will be substituted with the corresponding residue from the CDR donor antibody to alter, preferably improve, antigen binding. These framework substitutions are identified by methods well known in the art, e.g., by modeling of the interactions of the CDR and framework residues to identify framework residues important for antigen binding and sequence comparison to identify unusual framework residues at particular positions. (See, e.g., Queen et al., U.S. Pat. No. 5,585,089; Riechmann et al., Nature 332:323 (1988), which are incorporated herein by reference in their entireties.) Antibodies can be humanized using a variety of techniques known in the art including, for example, CDR-grafting (EP 239,400; PCT publication WO 91/09967; U.S. Pat. Nos. 5,225,539; 5,530,101; and 5,585,089), veneering or resurfacing (EP 592,106; EP 519,596; Padlan, Molecular Immunology 28(4/5):489-498 (1991); Studnicka et al., Protein Engineering 7(6):805-814 (1994); Roguska. et al., PNAS 91:969-973 (1994)), and chain shuffling (U.S. Pat. No. 5,565,332).

[0235] Completely human antibodies are particularly desirable for therapeutic treatment of human patients. Human antibodies can be made by a variety of methods known in the art including phage display methods described above using antibody libraries derived from human immunoglobulin sequences. See also, U.S. Pat. Nos. 4,444,887 and 4,716,111; and PCT publications WO 98/46645, WO 98/50433, WO 98/24893, WO 98/16654, WO 96/34096, WO 96/33735, and WO 91/10741; each of which is incorporated herein by reference in its entirety.

[0236] Human antibodies can also be produced using transgenic mice which are incapable of expressing functional endogenous immunoglobulins, but which can express human immunoglobulin genes. For example, the human heavy and light chain immunoglobulin gene complexes may be introduced randomly or by homologous recombination into mouse embryonic stem cells. Alternatively, the human variable region, constant region, and diversity region may be introduced into mouse embryonic stem cells in addition to the human heavy and light chain genes. The mouse heavy and light chain immunoglobulin genes may be rendered non-functional separately or simultaneously with the introduction of human immunoglobulin loci by homologous recombination. In particular, homozygous deletion of the JH region prevents endogenous antibody production. The modified embryonic stem cells are expanded and microinjected into blastocysts to produce chimeric mice. The chimeric mice are then bred to produce homozygous offspring, which express human antibodies. The transgenic mice are immunized in the normal fashion with a selected antigen, e.g., all or a portion of a polypeptide of the invention. Monoclonal antibodies directed against the antigen can be obtained from the inununized, transgenic mice using conventional hybridoma technology. The human immunoglobulin transgenes harbored by the transgenic mice rearrange during B cell differentiation, and subsequently undergo class switching and somatic mutation. Thus, using such a technique, it is possible to produce therapeutically useful IgG, IgA, IgM and IgE antibodies. For an overview of this technology for producing human antibodies, see Lonberg and Huszar, Int. Rev. Immunol. 13:65-93 (1995). For a detailed discussion of this technology for producing human antibodies and human monoclonal antibodies and protocols for producing such antibodies, see, e.g., PCT publications WO 98/24893; WO 92/01047; WO 96/34096; WO 96/33735; European Patent No. 0 598 877; U.S. Pat. Nos. 5,413,923; 5,625,126; 5,633,425; 5,569,825; 5,661,016; 5,545,806; 5,814,318; 5,885,793; 5,916,771; 5,939,598; 6,075,181 and 6,114,598, which are incorporated by reference herein in their entirety. In addition, companies such as Abgenix, Inc. (Freemont, Calif.) and Genpharm (San Jose, Calif.) can be engaged to provide human antibodies directed against a selected antigen using technology similar to that described above.

[0237] Completely human antibodies which recognize a selected epitope can be generated using a technique referred to as “guided selection.” In this approach a selected non-human monoclonal antibody, e.g., a mouse antibody, is used to guide the selection of a completely human antibody recognizing the same epitope. (Jespers et al., Bio/technology 12:899-903 (1988)).

[0238] Further, antibodies to the polypeptides of the invention can, in turn, be utilized to generate anti-idiotype antibodies that “mimic” polypeptides of the invention using techniques well known to those skilled in the art. (See, e.g., Greenspan & Bona, FASEB J. 7(5):437-444; (1989) and Nissinoff, J. Immunol. 147(8):2429-2438 (1991)). For example, antibodies which bind to and competitively inhibit polypeptide multimerization and/or binding of a polypeptide of the invention to a ligand can be used to generate anti-idiotypes that “mimic” the polypeptide multimerization and/or binding domain and, as a consequence, bind to and neutralize polypeptide and/or its ligand. Such neutralizing anti-idiotypes or Fab fragments of such anti-idiotypes can be used in therapeutic regimens to neutralize polypeptide ligand/receptor. For example, such anti-idiotypic antibodies can be used to bind a polypeptide of the invention and/or to bind its ligand(s)/receptor(s), and thereby block its biological activity. Alternatively, antibodies which bind to and enhance polypeptide multimerization and/or binding, and/or receptor/ligand multimerization, binding and/or signaling can be used to generate anti-idiotypes that function as agonists of a polypeptide of the invention and/or its ligand/receptor. Such agonistic anti-idiotypes or Fab fragments of such anti-idiotypes can be used in therapeutic regimens as agonists of the polypeptides of the invention or its ligand(s)/receptor(s). For example, such anti-idiotypic antibodies can be used to bind a polypeptide of the invention and/or to bind its ligand(s)/receptor(s), and thereby promote or enhance its biological activity.

[0239] Intrabodies of the invention can be produced using methods known in the art, such as those disclosed and reviewed in Chen et al., Hum. Gene Ther. 5:595-601 (1994); Marasco, W. A., Gene Ther. 4:11-15 (1997); Rondon and Marasco, Annu. Rev. Microbiol. 51:257-283 (1997); Proba et al., J. Mol. Biol. 275:245-253 (1998); Cohen et al., Oncogene 17:2445-2456 (1998); Ohage and Steipe, J. Mol. Biol. 291:1119-1128 (1999); Ohage et al., J. Mol. Biol. 291:1129-1134 (1999); Wirtz and Steipe, Protein Sci. 8:2245-2250 (1999); Zhu et al., J. Immunol. Methods 231:207-222 (1999); and references cited therein.

[0240] Polynucleotides Encoding Antibodies

[0241] The invention further provides polynucleotides comprising a nucleotide sequence encoding an antibody of the invention and fragments thereof. The invention also encompasses polynucleotides that hybridize under stringent or alternatively, under lower stringency hybridization conditions, e.g., as defined supra, to polynucleotides that encode an antibody, preferably, that specifically binds to a polypeptide of the invention, preferably, an antibody that binds to a polypeptide having the amino acid sequence of SEQ ID NO:Y, to a polypeptide encoded by a portion of SEQ ID NO:X as defined in columns 8 and 9 of Table 2, and/or to a polypeptide encoded by the cDNA contained in Clone ID NO:Z.

[0242] The polynucleotides may be obtained, and the nucleotide sequence of the polynucleotides determined, by any method known in the art. For example, if the nucleotide sequence of the antibody is known, a polynucleotide encoding the antibody may be assembled from chemically synthesized oligonucleotides (e.g., as described in Kutmeier et al., BioTechniques 17:242 (1994)), which, briefly, involves the synthesis of overlapping oligonucleotides containing portions of the sequence encoding the antibody, annealing and ligating of those oligonucleotides, and then amplification of the ligated oligonucleotides by PCR.

[0243] Alternatively, a polynucleotide encoding an antibody may be generated from nucleic acid from a suitable source. If a clone containing a nucleic acid encoding a particular antibody is not available, but the sequence of the antibody molecule is known, a nucleic acid encoding the immunoglobulin may be chemically synthesized or obtained from a suitable source (e.g., an antibody cDNA library, or a cDNA library generated from, or nucleic acid, preferably poly A+ RNA, isolated from, any tissue or cells expressing the antibody, such as hybridoma cells selected to express an antibody of the invention) by PCR amplification using synthetic primers hybridizable to the 3′ and 5′ ends of the sequence or by cloning using an oligonucleotide probe specific for the particular gene sequence to identify, e.g., a cDNA clone from a cDNA library that encodes the antibody. Amplified nucleic acids generated by PCR may then be cloned into replicable cloning vectors using any method well known in the art.

[0244] Once the nucleotide sequence and corresponding amino acid sequence of the antibody is determined, the nucleotide sequence of the antibody may be manipulated using methods well known in the art for the manipulation of nucleotide sequences, e.g., recombinant DNA techniques, site directed mutagenesis, PCR, etc. (see, for example, the techniques described in Sambrook et al., 1990, Molecular Cloning, A Laboratory Manual, 2d Ed., Cold Spring Harbor Laboratory, Cold Spring Harbor, N.Y. and Ausubel et al., eds., 1998, Current Protocols in Molecular Biology, John Wiley & Sons, NY, which are both incorporated by reference herein in their entireties), to generate antibodies having a different amino acid sequence, for example to create amino acid substitutions, deletions, and/or insertions.

[0245] In a specific embodiment, the amino acid sequence of the heavy and/or light chain variable domains may be inspected to identify the sequences of the complementarity determining regions (CDRs) by methods that are well know in the art, e.g., by comparison to known amino acid sequences of other heavy and light chain variable regions to determine the regions of sequence hypervariability. Using routine recombinant DNA techniques, one or more of the CDRs may be inserted within framework regions, e.g., into human framework regions to humanize a non-human antibody, as described supra. The framework regions may be naturally occurring or consensus framework regions, and preferably human framework regions (see, e.g., Chothia et al., J. Mol. Biol. 278: 457-479 (1998) for a listing of human framework regions). Preferably, the polynucleotide generated by the combination of the framework regions and CDRs encodes an antibody that specifically binds a polypeptide of the invention. Preferably, as discussed supra, one or more amino acid substitutions may be made within the framework regions, and, preferably, the amino acid substitutions improve binding of the antibody to its antigen. Additionally, such methods may be used to make amino acid substitutions or deletions of one or more variable region cysteine residues participating in an intrachain disulfide bond to generate antibody molecules lacking one or more intrachain disulfide bonds. Other alterations to the polynucleotide are encompassed by the present invention and within the skill of the art.

[0246] In addition, techniques developed for the production of “chimeric antibodies” (Morrison et al., Proc. Natl. Acad. Sci. 81:851-855 (1984); Neuberger et al., Nature 312:604-608 (1984); Takeda et al., Nature 314:452-454 (1985)) by splicing genes from a mouse antibody molecule of appropriate antigen specificity together with genes from a human antibody molecule of appropriate biological activity can be used. As described supra, a chimeric antibody is a molecule in which different portions are derived from different animal species, such as those having a variable region derived from a murine mAb and a human immunoglobulin constant region, e.g., humanized antibodies.

[0247] Alternatively, techniques described for the production of single chain antibodies (U.S. Pat. No. 4,946,778; Bird, Science 242:423-42 (1988); Huston et al., Proc. Natl. Acad. Sci. USA 85:5879-5883 (1988); and Ward et al., Nature 334:544-54 (1989)) can be adapted to produce single chain antibodies. Single chain antibodies are formed by linking the heavy and light chain fragments of the Fv region via an amino acid bridge, resulting in a single chain polypeptide. Techniques for the assembly of functional Fv fragments in E. coli may also be used (Skerra et al., Science 242:1038-1041 (1988)).

[0248] Methods of Producing Antibodies

[0249] The antibodies of the invention can be produced by any method known in the art for the synthesis of antibodies, in particular, by chemical synthesis or preferably, by recombinant expression techniques. Methods of producing antibodies include, but are not limited to, hybridoma technology, EBV transformation, and other methods discussed herein as well as through the use recombinant DNA technology, as discussed below.

[0250] Recombinant expression of an antibody of the invention, or fragment, derivative or analog thereof, (e.g., a heavy or light chain of an antibody of the invention or a single chain antibody of the invention), requires construction of an expression vector containing a polynucleotide that encodes the antibody. Once a polynucleotide encoding an antibody molecule or a heavy or light chain of an antibody, or portion thereof (preferably containing the heavy or light chain variable domain), of the invention has been obtained, the vector for the production of the antibody molecule may be produced by recombinant DNA technology using techniques well known in the art. Thus, methods for preparing a protein by expressing a polynucleotide containing an antibody encoding nucleotide sequence are described herein. Methods which are well known to those skilled in the art can be used to construct expression vectors containing antibody coding sequences and appropriate transcriptional and translational control signals. These methods include, for example, in vitro recombinant DNA techniques, synthetic techniques, and in vivo genetic recombination. The invention, thus, provides replicable vectors comprising a nucleotide sequence encoding an antibody molecule of the invention, or a heavy or light chain thereof, or a heavy or light chain variable domain, operably linked to a promoter. Such vectors may include the nucleotide sequence encoding the constant region of the antibody molecule (see, e.g., PCT Publication WO 86/05807; PCT Publication WO 89/01036; and U.S. Pat. No. 5,122,464) and the variable domain of the antibody may be cloned into such a vector for expression of the entire heavy or light chain.

[0251] The expression vector is transferred to a host cell by conventional techniques and the transfected cells are then cultured by conventional techniques to produce an antibody of the invention. Thus, the invention includes host cells containing a polynucleotide encoding an antibody of the invention, or a heavy or light chain thereof, or a single chain antibody of the invention, operably linked to a heterologous promoter. In preferred embodiments for the expression of double-chained antibodies, vectors encoding both the heavy and light chains may be co-expressed in the host cell for expression of the entire immunoglobulin molecule, as detailed below.

[0252] A variety of host-expression vector systems may be utilized to express the antibody molecules of the invention. Such host-expression systems represent vehicles by which the coding sequences of interest may be produced and subsequently purified, but also represent cells which may, when transformed or transfected with the appropriate nucleotide coding sequences, express an antibody molecule of the invention in situ. These include but are not limited to microorganisms such as bacteria (e.g., E. coli, B. subtilis) transformed with recombinant bacteriophage DNA, plasmid DNA or cosmid DNA expression vectors containing antibody coding sequences; yeast (e.g., Saccharomyces, Pichia) transformed with recombinant yeast expression vectors containing antibody coding sequences; insect cell systems infected with recombinant virus expression vectors (e.g., baculovirus) containing antibody coding sequences; plant cell systems infected with recombinant virus expression vectors (e.g., cauliflower mosaic virus, CaMV; tobacco mosaic virus, TMV) or transformed with recombinant plasmid expression vectors (e.g., Ti plasmid) containing antibody coding sequences; or mammalian cell systems (e.g., COS, CHO, BHK, 293, 3T3 cells) harboring recombinant expression constructs containing promoters derived from the genome of mammalian cells (e.g., metallothionein promoter) or from mammalian viruses (e.g., the adenovirus late promoter; the vaccinia virus 7.5K promoter). Preferably, bacterial cells such as Escherichia coli, and more preferably, eukaryotic cells, especially for the expression of whole recombinant antibody molecule, are used for the expression of a recombinant antibody molecule. For example, mammalian cells such as Chinese hamster ovary cells (CHO), in conjunction with a vector such as the major intermediate early gene promoter element from human cytomegalovirus is an effective expression system for antibodies (Foecking et al., Gene 45:101 (1986); Cockett et al., Bio/Technology 8:2 (1990)).

[0253] In bacterial systems, a number of expression vectors may be advantageously selected depending upon the use intended for the antibody molecule being expressed. For example, when a large quantity of such a protein is to be produced, for the generation of pharmaceutical compositions of an antibody molecule, vectors which direct the expression of high levels of fusion protein products that are readily purified may be desirable. Such vectors include, but are not limited, to the E. coli expression vector pUR278 (Ruther et al., EMBO J. 2:1791 (1983)), in which the antibody coding sequence may be ligated individually into the vector in frame with the lac Z coding region so that a fusion protein is produced; pIN vectors (Inouye & Inouye, Nucleic Acids Res. 13:3101-3109 (1985); Van Heeke & Schuster, J. Biol. Chem. 24:5503-5509 (1989)); and the like. pGEX vectors may also be used to express foreign polypeptides as fusion proteins with glutathione S-transferase (GST). In general, such fusion proteins are soluble and can easily be purified from lysed cells by adsorption and binding to matrix glutathione-agarose beads followed by elution in the presence of free glutathione. The pGEX vectors are designed to include thrombin or factor Xa protease cleavage sites so that the cloned target gene product can be released from the GST moiety.

[0254] In an insect system, Autographa californica nuclear polyhedrosis virus (ACNPV) is used as a vector to express foreign genes. The virus grows in Spodoptera frugiperda cells. The antibody coding sequence may be cloned individually into non-essential regions (for example the polyhedrin gene) of the virus and placed under control of an AcNPV promoter (for example the polyhedrin promoter).

[0255] In mammalian host cells, a number of viral-based expression systems may be utilized. In cases where an adenovirus is used as an expression vector, the antibody coding sequence of interest may be ligated to an adenovirus transcription/translation control complex, e.g., the late promoter and tripartite leader sequence. This chimeric gene may then be inserted in the adenovirus genome by in vitro or in vivo recombination. Insertion in a non-essential region of the viral genome (e.g., region E1 or E3) will result in a recombinant virus that is viable and capable of expressing the antibody molecule in infected hosts. (e.g., see Logan & Shenk, Proc. Natl. Acad. Sci. USA 81:355-359 (1984)). Specific initiation signals may also be required for efficient translation of inserted antibody coding sequences. These signals include the ATG initiation codon and adjacent sequences. Furthermore, the initiation codon must be in phase with the reading frame of the desired coding sequence to ensure translation of the entire insert. These exogenous translational control signals and initiation codons can be of a variety of origins, both natural and synthetic. The efficiency of expression may be enhanced by the inclusion of appropriate transcription enhancer elements, transcription terminators, etc. (see Bittner et al., Methods in Enzymol. 153:51-544 (1987)).

[0256] In addition, a host cell strain may be chosen which modulates the expression of the inserted sequences, or modifies and processes the gene product in the specific fashion desired. Such modifications (e.g., glycosylation) and processing (e.g., cleavage) of protein products may be important for the function of the protein. Different host cells have characteristic and specific mechanisms for the post-translational processing and modification of proteins and gene products. Appropriate cell lines or host systems can be chosen to ensure the correct modification and processing of the foreign protein expressed. To this end, eukaryotic host cells which possess the cellular machinery for proper processing of the primary transcript, glycosylation, and phosphorylation of the gene product may be used. Such mammalian host cells include but are not limited to CHO, VERY, BHK, Hela, COS, MDCK, 293, 3T3, W138, and in particular, breast cancer cell lines such as, for example, BT483, Hs578T, HTB2, BT20 and T47D, and normal mammary gland cell line such as, for example, CRL7030 and Hs578Bst.

[0257] For long-term, high-yield production of recombinant proteins, stable expression is preferred. For example, cell lines, which stably express the antibody molecule may be engineered. Rather than using expression vectors which contain viral origins of replication, host cells can be transformed with DNA controlled by appropriate expression control elements (e.g., promoter, enhancer, sequences, transcription terminators, polyadenylation sites, etc.), and a selectable marker. Following the introduction of the foreign DNA, engineered cells may be allowed to grow for 1-2 days in an enriched media, and then are switched to a selective media. The selectable marker in the recombinant plasmid confers resistance to the selection and allows cells to stably integrate the plasmid into their chromosomes and grow to form foci which in turn can be cloned and expanded into cell lines. This method may advantageously be used to engineer cell lines, which express the antibody molecule. Such engineered cell lines may be particularly useful in screening and evaluation of compounds that interact directly or indirectly with the antibody molecule.

[0258] A number of selection systems may be used, including but not limited to the herpes simplex virus thymidine kinase (Wigler et al., Cell 11:223 (1977)), hypoxanthine-guanine phosphoribosyltransferase (Szybalska & Szybalski, Proc. Natl. Acad. Sci. USA 48:202 (1992)), and adenine phosphoribosyltransferase (Lowy et al., Cell 22:817 (1980)) genes can be employed in tk-, hgprt- or aprt-cells, respectively. Also, antimetabolite resistance can be used as the basis of selection for the following genes: dhfr, which confers resistance to methotrexate (Wigler et al., Natl. Acad. Sci. USA 77:357 (1980); O'Hare et al., Proc. Natl. Acad. Sci. USA 78:1527 (1981)); gpt, which confers resistance to mycophenolic acid (Mulligan & Berg, Proc. Natl. Acad. Sci. USA 78:2072 (1981)); neo, which confers resistance to the aminoglycoside G-418 Clinical Pharmacy 12:488-505; Wu and Wu, Biotherapy 3:87-95 (1991); Tolstoshev, Ann. Rev. Pharmacol. Toxicol. 32:573-596 (1993); Mulligan, Science 260:926-932 (1993); and Morgan and Anderson, Ann. Rev. Biochem. 62:191-217 (1993); TIB TECH 11(5):155-215 (1993)); and hygro, which confers resistance to hygromycin (Santerre et al., Gene 30:147 (1984)). Methods commonly known in the art of recombinant DNA technology may be routinely applied to select the desired recombinant clone, and such methods are described, for example, in Ausubel et al. (eds.), Current Protocols in Molecular Biology, John Wiley & Sons, NY (1993); Kriegler, Gene Transfer and Expression, A Laboratory Manual, Stockton Press, NY (1990); and in Chapters 12 and 13, Dracopoli et al. (eds), Current Protocols in Human Genetics, John Wiley & Sons, NY (1994); Colberre-Garapin et al., J. Mol. Biol. 150:1 (1981), which are incorporated by reference herein in their entireties.

[0259] The expression levels of an antibody molecule can be increased by vector amplification (for a review, see Bebbington and Hentschel, The use of vectors based on gene amplification for the expression of cloned genes in mammalian cells in DNA cloning, Vol.3. (Academic Press, New York, 1987)). When a marker in the vector system expressing antibody is amplifiable, increase in the level of inhibitor present in culture of host cell will increase the number of copies of the marker gene. Since the amplified region is associated with the antibody gene, production of the antibody will also increase (Crouse et al., Mol. Cell. Biol. 3:257 (1983)).

[0260] Vectors, which use glutamine synthase (GS) or DHFR as the selectable markers can be amplified in the presence of the drugs methionine sulphoximine or methotrexate, respectively. An advantage of glutamine synthase based vectors are the availabilty of cell lines (e.g., the murine myeloma cell line, NSO) which are glutamine synthase negative. Glutamine synthase expression systems can also function in glutamine synthase expressing cells (e.g., Chinese Hamster Ovary (CHO) cells) by providing additional inhibitor to prevent the functioning of the endogenous gene. A glutamine synthase expression system and components thereof are detailed in PCT publications: WO87/04462; WO86/05807; WO89/01036; WO89/10404; and WO91/06657, which are incorporated in their entireties by reference herein. Additionally, glutamine synthase expression vectors that may be used according to the present invention are commercially available from suplliers, including, for example Lonza Biologics, Inc. (Portsmouth, N.H.). Expression and production of monoclonal antibodies using a GS expression system in murine myeloma cells is described in Bebbington et al., Bio/technology 10:169(1992) and in Biblia and Robinson Biotechnol. Prog. 11:1 (1995) which are incorporated in their entirities by reference herein.

[0261] The host cell may be co-transfected with two expression vectors of the invention, the first vector encoding a heavy chain derived polypeptide and the second vector encoding a light chain derived polypeptide. The two vectors may contain identical selectable markers, which enable equal expression of heavy and light chain polypeptides. Alternatively, a single vector may be used which encodes, and is capable of expressing, both heavy and light chain polypeptides. In such situations, the light chain should be placed before the heavy chain to avoid an excess of toxic free heavy chain (Proudfoot, Nature 322:52 (1986); Kohler, Proc. Natl. Acad. Sci. USA 77:2197 (1980)). The coding sequences for the heavy and light chains may comprise cDNA or genomic DNA.

[0262] Once an antibody molecule of the invention has been produced by an animal, chemically synthesized, or recombinantly expressed, it may be purified by any method known in the art for purification of an immunoglobulin molecule, for example, by chromatography (e.g., ion exchange, affinity, particularly by affinity for the specific antigen after Protein A, and sizing column chromatography), centrifugation, differential solubility, or by any other standard technique for the purification of proteins. In addition, the antibodies of the present invention or fragments thereof can be fused to heterologous polypeptide sequences described herein or otherwise known in the art, to facilitate purification.

[0263] The present invention encompasses antibodies recombinantly fused or chemically conjugated (including both covalently and non-covalently conjugations) to a polypeptide (or portion thereof, preferably at least 10, 20, 30, 40, 50, 60, 70, 80, 90 or 100 amino acids of the polypeptide) of the present invention to generate fusion proteins. The fusion does not necessarily need to be direct, but may occur through linker sequences. The antibodies may be specific for antigens other than polypeptides (or portion thereof, preferably at least 10, 20, 30, 40, 50, 60, 70, 80, 90 or 100 amino acids of the polypeptide) of the present invention. For example, antibodies may be used to target the polypeptides of the present invention to particular cell types, either in vitro or in vivo, by fusing or conjugating the polypeptides of the present invention to antibodies specific for particular cell surface receptors. Antibodies fused or conjugated to the polypeptides of the present invention may also be used in in vitro immunoassays and purification methods using methods known in the art. See e.g., Harbor et al., supra, and PCT publication WO 93/21232; EP 439,095; Naramura et al., Immunol. Lett. 39:91-99 (1994); U.S. Patent 5,474,981; Gillies et al., PNAS 89:1428-1432 (1992); Fell et al., J. Immunol. 146:2446-2452 (1991), which are incorporated by reference in their entireties.

[0264] The present invention further includes compositions comprising the polypeptides of the present invention fused or conjugated to antibody domains other than the variable regions. For example, the polypeptides of the present invention may be fused or conjugated to an antibody Fc region, or portion thereof. The antibody portion fused to a polypeptide of the present invention may comprise the constant region, hinge region, CH1 domain, CH2 domain, and CH3 domain or any combination of whole domains or portions thereof. The polypeptides may also be fused or conjugated to the above antibody portions to form multimers. For example, Fc portions fused to the polypeptides of the present invention can form dimers through disulfide bonding between the Fc portions. Higher multimeric forms can be made by fusing the polypeptides to portions of IgA and IgM. Methods for fusing or conjugating the polypeptides of the present invention to antibody portions are known in the art. See, e.g., U.S. Pat. Nos. 5,336,603; 5,622,929; 5,359,046; 5,349,053; 5,447,851; 5,112,946; EP 307,434; EP 367,166; PCT publications WO 96/04388; WO 91/06570; Ashkenazi et al., Proc. Natl. Acad. Sci. USA 88:10535-10539 (1991); Zheng et al., J. Immunol. 154:5590-5600 (1995); and Vil et al., Proc. Natl. Acad. Sci. USA 89:11337-11341 (1992) (said references incorporated by reference in their entireties).

[0265] As discussed, supra, the polypeptides corresponding to a polypeptide, polypeptide fragment, or a variant of SEQ ID NO:Y may be fused or conjugated to the above antibody portions to increase the in vivo half life of the polypeptides or for use in immunoassays using methods known in the art. Further, the polypeptides corresponding to SEQ ID NO:Y may be fused or conjugated to the above antibody portions to facilitate purification. One reported example describes chimeric proteins consisting of the first two domains of the human CD4-polypeptide and various domains of the constant regions of the heavy or light chains of mammalian immunoglobulins. See EP 394,827; Traunecker et al., Nature 331:84-86 (1988). The polypeptides of the present invention fused or conjugated to an antibody having disulfide-linked dimeric structures (due to the IgG) may also be more efficient in binding and neutralizing other molecules, than the monomeric secreted protein or protein fragment alone. See, for example, Fountoulakis et al., J. Biochem. 270:3958-3964 (1995). In many cases, the Fc part in a fusion protein is beneficial in therapy and diagnosis, and thus can result in, for example, improved pharmacokinetic properties. See, for example, EP A 232,262. Alternatively, deleting the Fc part after the fusion protein has been expressed, detected, and purified, would be desired. For example, the Fc portion may hinder therapy and diagnosis if the fusion protein is used as an antigen for immunizations. In drug discovery, for example, human proteins, such as hIL-5, have been fused with Fc portions for the purpose of high-throughput screening assays to identify antagonists of hIL-5. (See, Bennett et al., J. Molecular Recognition 8:52-58 (1995); Johanson et al., J. Biol. Chem. 270:9459-9471 (1995)).

[0266] Moreover, the antibodies or fragments thereof of the present invention can be fused to marker sequences, such as a peptide to facilitate purification. In preferred embodiments, the marker amino acid sequence is a hexa-histidine peptide, such as the tag provided in a pQE vector (QIAGEN, Inc., 9259 Eton Avenue, Chatsworth, Calif., 91311), among others, many of which are commercially available. As described in Gentz et al., Proc. Natl. Acad. Sci. USA 86:821-824 (1989), for instance, hexahistidine provides for convenient purification of the fusion protein. Other peptide tags useful for purification include, but are not limited to, the “HA” tag, which corresponds to an epitope derived from the influenza hemagglutinin protein (Wilson et al., Cell 37:767 (1984)) and the “flag” tag.

[0267] The present invention further encompasses antibodies or fragments thereof conjugated to a diagnostic or therapeutic agent. The antibodies can be used diagnostically to, for example, monitor the development or progression of a tumor as part of a clinical testing procedure to, e.g., determine the efficacy of a given treatment regimen. Detection can be facilitated by coupling the antibody to a detectable substance. Examples of detectable substances include various enzymes, prosthetic groups, fluorescent materials, luminescent materials, bioluminescent materials, radioactive materials, positron emitting metals using various positron emission tomographies, and nonradioactive paramagnetic metal ions. The detectable substance may be coupled or conjugated either directly to the antibody (or fragment thereof) or indirectly, through an intermediate (such as, for example, a linker known in the art) using techniques known in the art. See, for example, U.S. Pat. No. 4,741,900 for metal ions which can be conjugated to antibodies for use as diagnostics according to the present invention.

[0268] Further, an antibody or fragment thereof may be conjugated to a therapeutic moiety such as a cytotoxin, e.g., a cytostatic or cytocidal agent, a therapeutic agent or a radioactive metal ion, e.g., alpha-emitters such as, for example, 213Bi. A cytotoxin or cytotoxic agent includes any agent that is detrimental to cells. Examples include paclitaxol, cytochalasin B, gramicidin D, ethidium bromide, emetine, mitomycin, etoposide, tenoposide, vincristine, vinblastine, colchicin, doxorubicin, daunorubicin, dihydroxy anthracin dione, mitoxantrone, mithramycin, actinomycin D, 1-dehydrotestosterone, glucocorticoids, procaine, tetracaine, lidocaine, propranolol, and puromycin and analogs or homologs thereof. Therapeutic agents include, but are not limited to, antimetabolites (e.g., methotrexate, 6-mercaptopurine, 6-thioguanine, cytarabine, 5-fluorouracil decarbazine), alkylating agents (e.g., mechlorethamine, thioepa chlorambucil, melphalan, carmustine (BSNU) and lomustine (CCNU), cyclothosphamide, busulfan, dibromomannitol, streptozotocin, mitomycin C, and cis-dichlorodiamine platinum (II) (DDP) cisplatin), anthracyclines (e.g., daunorubicin (formerly daunomycin) and doxorubicin), antibiotics (e.g., dactinomycin (formerly actinomycin), bleomycin, mithramycin, and anthramycin (AMC)), and anti-mitotic agents (e.g., vincristine and vinblastine).

[0269] The conjugates of the invention can be used for modifying a given biological response, the therapeutic agent or drug moiety is not to be construed as limited to classical chemical therapeutic agents. For example, the drug moiety may be a protein or polypeptide possessing a desired biological activity. Such proteins may include, for example, a toxin such as abrin, ricin A, pseudomonas exotoxin, or diphtheria toxin; a protein such as tumor necrosis factor, a-interferon, β-interferon, nerve growth factor, platelet derived growth factor, tissue plasminogen activator, an apoptotic agent, e.g., TNF-alpha, TNF-beta, AIM I (See, International Publication No. WO 97/33899), AIM II (See, International Publication No. WO 97/34911), Fas Ligand (Takahashi et al., Int. Immunol., 6:1567-1574 (1994)), VEGI (See, International Publication No. WO 99/23105), a thrombotic agent or an anti-angiogenic agent, e.g., angiostatin or endostatin; or, biological response modifiers such as, for example, lymphokines, interleukin-1 (“IL-1”), interleukin-2 (“IL-2”), interleukin-6 (“IL-6”), granulocyte macrophage colony stimulating factor (“GM-CSF”), granulocyte colony stimulating factor (“G-CSF”), or other growth factors.

[0270] Antibodies may also be attached to solid supports, which are particularly useful for immunoassays or purification of the target antigen. Such solid supports include, but are not limited to, glass, cellulose, polyacrylamide, nylon, polystyrene, polyvinyl chloride or polypropylene.

[0271] Techniques for conjugating such therapeutic moiety to antibodies are well known. See, for example, Arnon et al., “Monoclonal Antibodies For Immunotargeting Of Drugs In Cancer Therapy”, in Monoclonal Antibodies And Cancer Therapy, Reisfeld et al. (eds.), pp. 243-56 (Alan R. Liss, Inc. 1985); Hellstrom et al., “Antibodies For Drug Delivery”, in Controlled Drug Delivery (2nd Ed.), Robinson et al. (eds.), pp. 623-53 (Marcel Dekker, Inc. 1987); Thorpe, “Antibody Carriers Of Cytotoxic Agents In Cancer Therapy: A Review”, in Monoclonal Antibodies '84: Biological And Clinical Applications, Pinchera et al. (eds.), pp. 475-506 (1985); “Analysis, Results, And Future Prospective Of The Therapeutic Use Of Radiolabeled Antibody In Cancer Therapy”, in Monoclonal Antibodies For Cancer Detection And Therapy, Baldwin et al. (eds.), pp. 303-16 (Academic Press 1985), and Thorpe et al., “The Preparation And Cytotoxic Properties Of Antibody-Toxin Conjugates”, Immunol. Rev. 62:119-58 (1982).

[0272] Alternatively, an antibody can be conjugated to a second antibody to form an antibody heteroconjugate as described by Segal in U.S. Pat. No. 4,676,980, which is incorporated herein by reference in its entirety.

[0273] An antibody, with or without a therapeutic moiety conjugated to it, administered alone or in combination with cytotoxic factor(s) and/or cytokine(s) can be used as a therapeutic.

[0274] Immunophenotyping

[0275] The antibodies of the invention may be utilized for immunophenotyping of cell lines and biological samples. Translation products of the genes of the present invention may be useful as cell specific markers, or more specifically as cellular markers that are differentially expressed at various stages of differentiation and/or maturation of particular cell types. Monoclonal antibodies directed against a specific epitope, or combination of epitopes, will allow for the screening of cellular populations expressing the marker. Various techniques can be utilized using monoclonal antibodies to screen for cellular populations expressing the marker(s), and include magnetic separation using antibody-coated magnetic beads, “panning” with antibody attached to a solid matrix (i.e., plate), and flow cytometry (See, e.g., U.S. Pat. No. 5,985,660; and Morrison et al., Cell, 96:737-49 (1999)).

[0276] These techniques allow for the screening of particular populations of cells, such as might be found with hematological malignancies (i.e. minimal residual disease (MRD) in acute leukemic patients) and “non-self” cells in transplantations to prevent Graft-versus-Host Disease (GVHD). Alternatively, these techniques allow for the screening of hematopoietic stem and progenitor cells capable of undergoing proliferation and/or differentiation, as might be found in human umbilical cord blood.

[0277] Assays for Antibody Binding

[0278] The antibodies of the invention may be assayed for immunospecific binding by any method known in the art. The immunoassays which can be used include but are not limited to competitive and non-competitive assay systems using techniques such as western blots, radioimmunoassays, ELISA (enzyme linked immunosorbent assay), “sandwich” immunoassays, immunoprecipitation assays, precipitin reactions, gel diffusion precipitin reactions, immunodiffusion assays, agglutination assays, complement-fixation assays, immunoradiometric assays, fluorescent immunoassays, and protein A immunoassays, to name but a few. Such assays are routine and well known in the art (see, e.g., Ausubel et al, eds, 1994, Current Protocols in Molecular Biology, Vol. 1, John Wiley & Sons, Inc., New York, which is incorporated by reference herein in its entirety). Exemplary immunoassays are described briefly below (but are not intended by way of limitation).

[0279] Immunoprecipitation protocols generally comprise lysing a population of cells in a lysis buffer such as RIPA buffer (1% NP-40 or Triton X-100, 1% sodium deoxycholate, 0.1% SDS, 0.15 M NaCl, 0.01 M sodium phosphate at pH 7.2, 1% Trasylol) supplemented with protein phosphatase and/or protease inhibitors (e.g., EDTA, PMSF, aprotinin, sodium vanadate), adding the antibody of interest to the cell lysate, incubating for a period of time (e.g., 1-4 hours) at 4° C., adding protein A and/or protein G sepharose beads to the cell lysate, incubating for about an hour or more at 4° C., washing the beads in lysis buffer and resuspending the beads in SDS/sample buffer. The ability of the antibody of interest to immunoprecipitate a particular antigen can be assessed by, e.g., western blot analysis. One of skill in the art would be knowledgeable as to the parameters that can be modified to increase the binding of the antibody to an antigen and decrease the background (e.g., pre-clearing the cell lysate with sepharose beads). For further discussion regarding immunoprecipitation protocols see, e.g., Ausubel et al., eds., (1994), Current Protocols in Molecular Biology, Vol. 1, John Wiley & Sons, Inc., New York, section 10.16.1.

[0280] Western blot analysis generally comprises preparing protein samples, electrophoresis of the protein samples in a polyacrylamide gel (e.g., 8%-20% SDS-PAGE depending on the molecular weight of the antigen), transferring the protein sample from the polyacrylamide gel to a membrane such as nitrocellulose, PVDF or nylon, blocking the membrane in blocking solution (e.g., PBS with 3% BSA or non-fat milk), washing the membrane in washing buffer (e.g., PBS-Tween 20), blocking the membrane with primary antibody (the antibody of interest) diluted in blocking buffer, washing the membrane in washing buffer, blocking the membrane with a secondary antibody (which recognizes the primary antibody, e.g., an anti-human antibody) conjugated to an enzymatic substrate (e.g., horseradish peroxidase or alkaline phosphatase) or radioactive molecule (e.g., 32P or 1251) diluted in blocking buffer, washing the membrane in wash buffer, and detecting the presence of the antigen. One of skill in the art would be knowledgeable as to the parameters that can be modified to increase the signal detected and to reduce the background noise. For further discussion regarding western blot protocols see, e.g., Ausubel et al., eds., (1994), Current Protocols in Molecular Biology, Vol. 1, John Wiley & Sons, Inc., New York, section 10.8.1.

[0281] ELISAs comprise preparing antigen, coating the well of a 96 well microtiter plate with the antigen, adding the antibody of interest conjugated to a detectable compound such as an enzymatic substrate (e.g., horseradish peroxidase or alkaline phosphatase) to the well and incubating for a period of time, and detecting the presence of the antigen. In ELISAs the antibody of interest does not have to be conjugated to a detectable compound; instead, a second antibody (which recognizes the antibody of interest) conjugated to a detectable compound may be added to the well. Further, instead of coating the well with the antigen, the antibody may be coated to the well. In this case, a second antibody conjugated to a detectable compound may be added following the addition of the antigen of interest to the coated well. One of skill in the art would be knowledgeable as to the parameters that can be modified to increase the signal detected as well as other variations of ELISAs known in the art. For further discussion regarding ELISAs see, e.g., Ausubel et al., eds, (1994), Current Protocols in Molecular Biology, Vol. 1, John Wiley & Sons, Inc., New York, section 11.2.1.

[0282] The binding affinity of an antibody to an antigen and the off-rate of an antibody-antigen interaction can be determined by competitive binding assays. One example of a competitive binding assay is a radioimmunoassay comprising the incubation of labeled antigen (e.g., 3H or 125I) with the antibody of interest in the presence of increasing amounts of unlabeled antigen, and the detection of the antibody bound to the labeled antigen. The affinity of the antibody of interest for a particular antigen and the binding off-rates can be determined from the data by scatchard plot analysis. Competition with a second antibody can also be determined using radioimmunoassays. In this case, the antigen is incubated with antibody of interest conjugated to a labeled compound (e.g., 3H or 125I) in the presence of increasing amounts of an unlabeled second antibody.

[0283] Antibodies of the invention may be characterized using immunocytochemisty methods on cells (e.g., mammalian cells, such as CHO cells) transfected with a vector enabling the expression of a colorectal cancer antigen or with vector alone using techniques commonly known in the art. Antibodies that bind colorectal cancer antigen transfected cells, but not vector-only transfected cells, are colorectal cancer antigen specific.

[0284] Therapeutic Uses

[0285] The present invention is further directed to antibody-based therapies which involve administering antibodies of the invention to an animal, preferably a mammal, and most preferably a human, patient for treating one or more of the disclosed diseases, disorders, or conditions. Therapeutic compounds of the invention include, but are not limited to, antibodies of the invention (including fragments, analogs and derivatives thereof as described herein) and nucleic acids encoding antibodies of the invention (including fragments, analogs and derivatives thereof and anti-idiotypic antibodies as described herein). The antibodies of the invention can be used to treat, inhibit or prevent diseases, disorders or conditions associated with aberrant expression and/or activity of a polypeptide of the invention, including, but not limited to, any one or more of the diseases, disorders, or conditions described herein. The treatment and/or prevention of diseases, disorders, or conditions associated with aberrant expression and/or activity of a polypeptide of the invention includes, but is not limited to, alleviating symptoms associated with those diseases, disorders or conditions. Antibodies of the invention may be provided in pharmaceutically acceptable compositions as known in the art or as described herein.

[0286] In a specific and preferred embodiment, the present invention is directed to antibody-based therapies which involve administering antibodies of the invention to an animal, preferably a mammal, and most preferably a human, patient for treating one or more of the diseases, disorders, or conditions of the colon and/or rectum, including, but not limited to, colon cancer, adenomatous colon polyps (e.g., villous adenoma), colon carcinoma, colorectal cancer, and/or as described under “Gastrointestinal Disorders” below. Therapeutic compounds of the invention include, but are not limited to, antibodies of the invention (e.g., antibodies directed to the full length protein expressed on the cell surface of a mammalian cell; antibodies directed to an epitope of a colorectal cancer associated polypeptide of the invention (such as, a linear epitope (shown in Table 1A, column 6) or a conformational epitope), including fragments, analogs and derivatives thereof as described herein) and nucleic acids encoding antibodies of the invention (including fragments, analogs and derivatives thereof and anti-idiotypic antibodies as described herein). The antibodies of the invention can be used to treat, inhibit or prevent diseases, disorders or conditions associated with aberrant expression and/or activity of a polypeptide of the invention, including, but not limited to, any one or more of the diseases, disorders, or conditions of the colon and.or rectum described herein. The treatment and/or prevention of diseases, disorders, or conditions of the colorectal cancer associated with aberrant expression and/or activity of a polypeptide of the invention includes, but is not limited to, alleviating symptoms associated with those diseases, disorders or conditions. Antibodies of the invention may be provided in pharmaceutically acceptable compositions as known in the art or as described herein.

[0287] A summary of the ways in which the antibodies of the present invention may be used therapeutically includes binding polynucleotides or polypeptides of the present invention locally or systemically in the body or by direct cytotoxicity of the antibody, e.g. as mediated by complement (CDC) or by effector cells (ADCC). Some of these approaches are described in more detail below. Armed with the teachings provided herein, one of ordinary skill in the art will know how to use the antibodies of the present invention for diagnostic, monitoring or therapeutic purposes without undue experimentation.

[0288] The antibodies of this invention may be advantageously utilized in combination with other monoclonal or chimeric antibodies, or with lymphokines or hematopoietic growth factors (such as, e.g., IL-2, IL-3 and IL-7), for example, which serve to increase the number or activity of effector cells which interact with the antibodies.

[0289] The antibodies of the invention may be administered alone or in combination with other types of treatments (e.g., radiation therapy, chemotherapy, hormonal therapy, immunotherapy and anti-tumor agents). Generally, administration of products of a species origin or species reactivity (in the case of antibodies) that is the same species as that of the patient is preferred. Thus, in a preferred embodiment, human antibodies, fragments derivatives, analogs, or nucleic acids, are administered to a human patient for therapy or prophylaxis.

[0290] It is preferred to use high affinity and/or potent in vivo inhibiting and/or neutralizing antibodies against polypeptides or polynucleotides of the present invention, fragments or regions thereof, for both immunoassays directed to and therapy of disorders related to polynucleotides or polypeptides, including fragments thereof, of the present invention. Such antibodies, fragments, or regions, will preferably have an affinity for polynucleotides or polypeptides of the invention, including fragments thereof. Preferred binding affinities include those with a dissociation constant or Kd less than 5×10⁻² M, 10⁻² M, 5×10⁻³ M, 10⁻³ M, 5×10⁻⁴ M, 10⁻⁴ M, 5×10⁻⁵ M, 10⁻⁵ M, 5×10⁻⁶ M, 10⁻⁶ M, 5×10⁻⁷ M, 10⁻⁷ M, 5×10⁻⁸ M, 10⁻⁸ M, 5×10⁻⁹ M, 10⁻⁹ M, 5×10⁻¹⁰ M, 10⁻¹⁰ M, 5×10⁻¹¹ M, 10⁻¹¹ M, 5×10⁻¹² M, 10⁻¹² M, 5×10⁻¹³ M, 10⁻¹³ M, 5×10⁻¹⁴ M, 10⁻¹⁴ M, 5×10¹⁵ M, and 10⁻¹⁵ M.

[0291] Gene Therapy

[0292] In a specific embodiment, nucleic acids comprising sequences encoding antibodies or functional derivatives thereof, are administered to treat, inhibit or prevent a disease or disorder associated with aberrant expression and/or activity of a polypeptide of the invention, by way of gene therapy. Gene therapy refers to therapy performed by the administration to a subject of an expressed or expressible nucleic acid. In this embodiment of the invention, the nucleic acids produce their encoded protein that mediates a therapeutic effect.

[0293] Any of the methods for gene therapy available in the art can be used according to the present invention. Exemplary methods are described below.

[0294] For general reviews of the methods of gene therapy, see Goldspiel et al., Clinical Pharmacy 12:488-505 (1993); Wu and Wu, Biotherapy 3:87-95 (1991); Tolstoshev, Ann. Rev. Pharmacol. Toxicol. 32:573-596 (1993); Mulligan, Science 260:926-932 (1993); and Morgan and Anderson, Ann. Rev. Biochem. 62.191-217 (1993); May, TIBTECH 11(5):155-215 (1993). Methods commonly known in the art of recombinant DNA technology which can be used are described in Ausubel et al. (eds.), Current Protocols in Molecular Biology, John Wiley & Sons, NY (1993); and Kriegler, Gene Transfer and Expression, A Laboratory Manual, Stockton Press, NY (1990).

[0295] In a preferred embodiment, the compound comprises nucleic acid sequences encoding an antibody, said nucleic acid sequences being part of expression vectors that express the antibody or fragments or chimeric proteins or heavy or light chains thereof in a suitable host. In particular, such nucleic acid sequences have promoters operably linked to the antibody coding region, said promoter being inducible or constitutive, and, optionally, tissue-specific. In another particular embodiment, nucleic acid molecules are used in which the antibody coding sequences and any other desired sequences are flanked by regions that promote homologous recombination at a desired site in the genome, thus providing for intrachromosomal expression of the antibody encoding nucleic acids (Koller and Smithies, Proc. Natl. Acad. Sci. USA 86:8932-8935 (1989); Zijlstra et al., Nature 342:435-438 (1989). In specific embodiments, the expressed antibody molecule is a single chain antibody; alternatively, the nucleic acid sequences include sequences encoding both the heavy and light chains, or fragments thereof, of the antibody.

[0296] Delivery of the nucleic acids into a patient may be either direct, in which case the patient is directly exposed to the nucleic acid or nucleic acid-carrying vectors, or indirect, in which case, cells are first transformed with the nucleic acids in vitro, then transplanted into the patient. These two approaches are known, respectively, as in vivo or ex vivo gene therapy.

[0297] In a specific embodiment, the nucleic acid sequences are directly administered in vivo, where it is expressed to produce the encoded product. This can be accomplished by any of numerous methods known in the art, e.g., by constructing them as part of an appropriate nucleic acid expression vector and administering it so that they become intracellular, e.g., by infection using defective or attenuated retrovirals or other viral vectors (see U.S. Pat. No. 4,980,286), or by direct injection of naked DNA, or by use of microparticle bombardment (e.g., a gene gun; Biolistic, Dupont), or coating with lipids or cell-surface receptors or transfecting agents, encapsulation in liposomes, microparticles, or microcapsules, or by administering them in linkage to a peptide which is known to enter the nucleus, by administering it in linkage to a ligand subject to receptor-mediated endocytosis (see, e.g., Wu and Wu, J. Biol. Chem. 262:4429-4432 (1987)) (which can be used to target cell types specifically expressing the receptors), etc. In another embodiment, nucleic acid-ligand complexes can be formed in which the ligand comprises a fusogenic viral peptide to disrupt endosomes, allowing the nucleic acid to avoid lysosomal degradation. In yet another embodiment, the nucleic acid can be targeted in vivo for cell specific uptake and expression, by targeting a specific receptor (see, e.g., PCT Publications WO 92/06180; WO 92/22635; WO92/20316; WO93/14188, WO 93/20221). Alternatively, the nucleic acid can be introduced intracellularly and incorporated within host cell DNA for expression, by homologous recombination (Koller and Smithies, Proc. Natl. Acad. Sci. USA 86:8932-8935 (1989); Zijlstra et al., Nature 342:435-438 (1989)).

[0298] In a specific embodiment, viral vectors that contains nucleic acid sequences encoding an antibody of the invention are used. For example, a retroviral vector can be used (see Miller et al., Meth. Enzymol. 217:581-599 (1993)). These retroviral vectors contain the components necessary for the correct packaging of the viral genome and integration into the host cell DNA. The nucleic acid sequences encoding the antibody to be used in gene therapy are cloned into one or more vectors, which facilitates delivery of the gene into a patient. More detail about retroviral vectors can be found in Boesen et al., Biotherapy 6:291-302 (1994), which describes the use of a retroviral vector to deliver the mdrl gene to hematopoietic stem cells in order to make the stem cells more resistant to chemotherapy. Other references illustrating the use of retroviral vectors in gene therapy are: Clowes et al., J. Clin. Invest. 93:644-651 (1994); Kiem et al., Blood 83:1467-1473 (1994); Salmons and Gunzberg, Human Gene Therapy 4:129-141 (1993); and Grossman and Wilson, Curr. Opin. in Genetics and Devel. 3:110-114 (1993).

[0299] Adenoviruses are other viral vectors that can be used in gene therapy. Adenoviruses are especially attractive vehicles for delivering genes to respiratory epithelia. Adenoviruses naturally infect respiratory epithelia where they cause a mild disease. Other targets for adenovirus-based delivery systems are liver, the central nervous system, endothelial cells, and muscle. Adenoviruses have the advantage of being capable of infecting non-dividing cells. Kozarsky and Wilson, Current Opinion in Genetics and Development 3:499-503 (1993) present a review of adenovirus-based gene therapy. Bout et al., Human Gene Therapy 5:3-10 (1994) demonstrated the use of adenovirus vectors to transfer genes to the respiratory epithelia of rhesus monkeys. Other instances of the use of adenoviruses in gene therapy can be found in Rosenfeld et al., Science 252:431-434 (1991); Rosenfeld et al., Cell 68:143-155 (1992); Mastrangeli et al., J. Clin. Invest. 91:225-234 (1993); PCT Publication W094/12649; and Wang, et al., Gene Therapy 2:775-783 (1995). In a preferred embodiment, adenovirus vectors are used.

[0300] Adeno-associated virus (AAV) has also been proposed for use in gene therapy (Walsh et al., Proc. Soc. Exp. Biol. Med. 204:289-300 (1993); U.S. Pat. No. 5,436,146).

[0301] Another approach to gene therapy involves transferring a gene to cells in tissue culture by such methods as electroporation, lipofection, calcium phosphate mediated transfection, or viral infection. Usually, the method of transfer includes the transfer of a selectable marker to the cells. The cells are then placed under selection to isolate those cells that have taken up and are expressing the transferred gene. Those cells are then delivered to a patient.

[0302] In this embodiment, the nucleic acid is introduced into a cell prior to administration in vivo of the resulting recombinant cell. Such introduction can be carried out by any method known in the art, including but not limited to transfection, electroporation, microinjection, infection with a viral or bacteriophage vector containing the nucleic acid sequences, cell fusion, chromosome-mediated gene transfer, microcell-mediated gene transfer, spheroplast fusion, etc. Numerous techniques are known in the art for the introduction of foreign genes into cells (see, e.g., Loeffler and Behr, Meth. Enzymol. 217:599-618 (1993); Cohen et al., Meth. Enzymol. 217:618-644 (1993); Cline, Pharmac. Ther. 29:69-92m (1985) and may be used in accordance with the present invention, provided that the necessary developmental and physiological functions of the recipient cells are not disrupted. The technique should provide for the stable transfer of the nucleic acid to the cell, so that the nucleic acid is expressible by the cell and preferably heritable and expressible by its cell progeny.

[0303] The resulting recombinant cells can be delivered to a patient by various methods known in the art. Recombinant blood cells (e.g., hematopoietic stem or progenitor cells) are preferably administered intravenously. The amount of cells envisioned for use depends on the desired effect, patient state, etc., and can be determined by one skilled in the art.

[0304] Cells into which a nucleic acid can be introduced for purposes of gene therapy encompass any desired, available cell type, and include but are not limited to epithelial cells, endothelial cells, keratinocytes, fibroblasts, muscle cells, hepatocytes; blood cells such as T lymphocytes, B lymphocytes, monocytes, macrophages, neutrophils, eosinophils, megakaryocytes, granulocytes; various stem or progenitor cells, in particular hematopoietic stem or progenitor cells, e.g., as obtained from bone marrow, umbilical cord blood, peripheral blood, fetal liver, etc.

[0305] In a preferred embodiment, the cell used for gene therapy is autologous to the patient.

[0306] In an embodiment in which recombinant cells are used in gene therapy, nucleic acid sequences encoding an antibody are introduced into the cells such that they are expressible by the cells or their progeny, and the recombinant cells are then administered in vivo for therapeutic effect. In a specific embodiment, stem or progenitor cells are used. Any stem and/or progenitor cells which can be isolated and maintained in vitro can potentially be used in accordance with this embodiment of the present invention (see e.g. PCT Publication WO 94/08598; Stemple and Anderson, Cell 71:973-985 (1992); Rheinwald, Meth. Cell Bio. 21A:229 (1980); and Pittelkow and Scott, Mayo Clinic Proc. 61:771 (1986)).

[0307] In a specific embodiment, the nucleic acid to be introduced for purposes of gene therapy comprises an inducible promoter operably linked to the coding region, such that expression-of the nucleic acid is controllable by the presence or absence of an appropriate inducer of transcription.

[0308] Demonstration of Therapeutic or Prophylactic Activity

[0309] The compounds or pharmaceutical compositions of the invention are preferably tested in vitro, and then in vivo for the desired therapeutic or prophylactic activity, prior to use in humans. For example, in vitro assays to demonstrate the therapeutic or prophylactic utility of a compound or pharmaceutical composition include, the effect of a compound on a cell line or a patient tissue sample. The effect of the compound or composition on the cell line and/or tissue sample can be determined utilizing techniques known to those of skill in the art including, but not limited to, rosette formation assays and cell lysis assays. In accordance with the invention, in vitro assays which can be used to determine whether administration of a specific compound is indicated, include in vitro cell culture assays in which a patient tissue sample is grown in culture, and exposed to or otherwise administered a compound, and the effect of such compound upon the tissue sample is observed.

[0310] Therapeutic/Prophylactic Administration and Composition

[0311] The invention provides methods of treatment, inhibition and prophylaxis by administration to a subject of an effective amount of a compound or pharmaceutical composition of the invention, preferably a polypeptide or antibody of the invention. In a preferred embodiment, the compound is substantially purified (e.g., substantially free from substances that limit its effect or produce undesired side-effects). The subject is preferably an animal, including but not limited to animals such as cows, pigs, horses, chickens, cats, dogs, etc., and is preferably a mammal, and most preferably human.

[0312] Formulations and methods of administration that can be employed when the compound comprises a nucleic acid or an immunoglobulin are described above; additional appropriate formulations and routes of administration can be selected from among those described herein below.

[0313] Various delivery systems are known and can be used to administer a compound of the invention, e.g., encapsulation in liposomes, microparticles, microcapsules, recombinant cells capable of expressing the compound, receptor-mediated endocytosis (see, e.g., Wu and Wu, J. Biol. Chem. 262:4429-4432 (1987)), construction of a nucleic acid as part of a retroviral or other vector, etc. Methods of introduction include but are not limited to intradermal, intramuscular, intraperitoneal, intravenous, subcutaneous, intranasal, epidural, and oral routes. The compounds or compositions may be administered by any convenient route, for example by infusion or bolus injection, by absorption through epithelial or mucocutaneous linings (e.g., oral mucosa, rectal and intestinal mucosa, etc.) and may be administered together with other biologically active agents. Administration can be systemic or local. In addition, it may be desirable to introduce the pharmaceutical compounds or compositions of the invention into the central nervous system by any suitable route, including intraventricular and intrathecal injection; intraventricular injection may be facilitated by an intraventricular catheter, for example, attached to a reservoir, such as an Ommaya reservoir. Pulmonary administration can also be employed, e.g., by use of an inhaler or nebulizer, and formulation with an aerosolizing agent.

[0314] In a specific embodiment, it may be desirable to administer the pharmaceutical compounds or compositions of the invention locally to the area in need of treatment; this may be achieved by, for example, and not by way of limitation, local infusion during surgery, topical application, e.g., in conjunction with a wound dressing after surgery, by injection, by means of a catheter, by means of a suppository, or by means of an implant, said implant being of a porous, non-porous, or gelatinous material, including membranes, such as sialastic membranes, or fibers. Preferably, when administering a protein, including an antibody, of the invention, care must be taken to use materials to which the protein does not absorb.

[0315] In another embodiment, the compound or composition can be delivered in a vesicle, in particular a liposome (see Langer, Science 249:1527-1533 (1990); Treat et al., in Liposomes in the Therapy of Infectious Disease and Cancer, Lopez-Berestein and Fidler (eds.), Liss, New York, pp. 353-365 (1989); Lopez-Berestein, ibid., pp. 317-327; see generally ibid.)

[0316] In yet another embodiment, the compound or composition can be delivered in a controlled release system. In one embodiment, a pump may be used (see Langer, supra; Sefton, CRC Crit. Ref. Biomed. Eng. 14:201 (1987); Buchwald et al., Surgery 88:507 (1980); Saudek et al., N. Engl. J. Med. 321:574 (1989)). In another embodiment, polymeric materials can be used (see Medical Applications of Controlled Release, Langer and Wise (eds.), CRC Pres., Boca Raton, Florida (1974); Controlled Drug Bioavailability, Drug Product Design and Performance, Smolen and Ball (eds.), Wiley, New York (1984); Ranger and Peppas, J., Macromol. Sci. Rev. Macromol. Chem. 23:61 (1983); see also Levy et al., Science 228:190 (1985); During et al., Ann. Neurol. 25:351 (1989); Howard et al., J.Neurosurg. 71:105 (1989)). In yet another embodiment, a controlled release system can be placed in proximity of the therapeutic target, e.g., the brain, thus requiring only a fraction of the systemic dose (see, e.g., Goodson, in Medical Applications of Controlled Release, supra, vol. 2, pp. 115-138 (1984)).

[0317] Other controlled release systems are discussed in the review by Langer (Science 249:1527-1533 (1990)).

[0318] In a specific embodiment where the compound of the invention is a nucleic acid encoding a protein, the nucleic acid can be administered in vivo to promote expression of its encoded protein, by constructing it as part of an appropriate nucleic acid expression vector and administering it so that it becomes intracellular, e.g., by use of a retroviral vector (see U.S. Patent No. 4,980,286), or by direct injection, or by use of microparticle bombardment (e.g., a gene gun; Biolistic, Dupont), or coating with lipids or cell-surface receptors or transfecting agents, or by administering it in linkage to a homeobox-like peptide which is known to enter the nucleus (see e.g., Joliot et al., Proc. Natl. Acad. Sci. USA 88:1864-1868 (1991)), etc. Alternatively, a nucleic acid can be introduced intracellularly and incorporated within host cell DNA for expression, by homologous recombination.

[0319] The present invention also provides pharmaceutical compositions. Such compositions comprise a therapeutically effective amount of a compound, and a pharmaceutically acceptable carrier. In a specific embodiment, the term “pharmaceutically acceptable” means approved by a regulatory agency of the Federal or a state government or listed in the U.S. Pharmacopeia or other generally recognized pharmacopeia for use in animals, and more particularly in humans. The term “carrier” refers to a diluent, adjuvant, excipient, or vehicle with which the therapeutic is administered. Such pharmaceutical carriers can be sterile liquids, such as water and oils, including those of petroleum, animal, vegetable or synthetic origin, such as peanut oil, soybean oil, mineral oil, sesame oil and the like. Water is a preferred carrier when the pharmaceutical composition is administered intravenously. Saline solutions and aqueous dextrose and glycerol solutions can also be employed as liquid carriers, particularly for injectable solutions. Suitable pharmaceutical excipients include starch, glucose, lactose, sucrose, gelatin, malt, rice, flour, chalk, silica gel, sodium stearate, glycerol monostearate, talc, sodium chloride, dried skim milk, glycerol, propylene, glycol, water, ethanol and the like. The composition, if desired, can also contain minor amounts of wetting or emulsifying agents, or pH buffering agents. These compositions can take the form of solutions, suspensions, emulsion, tablets, pills, capsules, powders, sustained-release formulations and the like. The composition can be formulated as a suppository, with traditional binders and carriers such as triglycerides. Oral formulation can include standard carriers such as pharmaceutical grades of mannitol, lactose, starch, magnesium stearate, sodium saccharine, cellulose, magnesium carbonate, etc. Examples of suitable pharmaceutical carriers are described in “Remington's Pharmaceutical Sciences” by E. W. Martin. Such compositions will contain a therapeutically effective amount of the compound, preferably in purified form, together with a suitable amount of carrier so as to provide the form for proper administration to the patient. The formulation should suit the mode of administration.

[0320] In a preferred embodiment, the composition is formulated in accordance with routine procedures as a pharmaceutical composition adapted for intravenous administration to human beings. Typically, compositions for intravenous administration are solutions in sterile isotonic aqueous buffer. Where necessary, the composition may also include a solubilizing agent and a local anesthetic such as lignocaine to ease pain at the site of the injection. Generally, the ingredients are supplied either separately or mixed together in unit dosage form, for example, as a dry lyophilized powder or water free concentrate in a hermetically sealed container such as an ampoule or sachette indicating the quantity of active agent. Where the composition is to be administered by infusion, it can be dispensed with an infusion bottle containing sterile pharmaceutical grade water or saline. Where the composition is administered by injection, an ampoule of sterile water for injection or saline can be provided so that the ingredients may be mixed prior to administration.

[0321] The compounds of the invention can be formulated as neutral or salt forms. Pharmaceutically acceptable salts include those formed with anions such as those derived from hydrochloric, phosphoric, acetic, oxalic, tartaric acids, etc., and those formed with cations such as those derived from sodium, potassium, ammonium, calcium, ferric hydroxides, isopropylamine, triethylamine, 2-ethylamino ethanol, histidine, procaine, etc.

[0322] The amount of the compound of the invention, which will be effective in the treatment, inhibition and prevention of a disease or disorder associated with aberrant expression and/or activity of a polypeptide of the invention can be determined by standard clinical techniques. In addition, in vitro assays may optionally be employed to help identify optimal dosage ranges. The precise dose to be employed in the formulation will also depend on the route of administration, and the seriousness of the disease or disorder, and should be decided according to the judgment of the practitioner and each patient's circumstances. Effective doses may be extrapolated from dose-response curves derived from in vitro or animal model test systems.

[0323] For antibodies, the dosage administered to a patient is typically 0.1 mg/kg to 100 mg/kg of the patient's body weight. Preferably, the dosage administered to a patient is between 0.1 mg/kg and 20 mg/kg of the patient's body weight, more preferably 1 mg/kg to 10 mg/kg of the patient's body weight. Generally, human antibodies have a longer half-life within the human body than antibodies from other species due to the immune response to the foreign polypeptides. Thus, lower dosages of human antibodies and less frequent administration is often possible. Further, the dosage and frequency of administration of antibodies of the invention may be reduced by enhancing uptake and tissue penetration (e.g., into the brain) of the antibodies by modifications such as, for example, lipidation.

[0324] The invention also provides a pharmaceutical pack or kit comprising one or more containers filled with one or more of the ingredients of the pharmaceutical compositions of the invention. Optionally associated with such container(s) can be a notice in the form prescribed by a governmental agency regulating the manufacture, use or sale of pharmaceuticals or biological products, which notice reflects approval by the agency of manufacture, use or sale for human administration.

[0325] Diagnosis and Imaging

[0326] Labeled antibodies, and derivatives and analogs thereof, which specifically bind to a polypeptide of interest can be used for diagnostic purposes to detect, diagnose, or monitor diseases, disorders, and/or conditions associated with the aberrant expression and/or activity of a polypeptide of the invention. The invention provides for the detection of aberrant expression of a polypeptide of interest, comprising (a) assaying the expression of the polypeptide of interest in cells or body fluid of an individual using one or more antibodies specific to the polypeptide interest and (b) comparing the level of gene expression with a standard gene expression level, whereby an increase or decrease in the assayed polypeptide gene expression level compared to the standard expression level is indicative of aberrant expression.

[0327] The invention provides a diagnostic assay for diagnosing a colorectal disorder, comprising (a) assaying the expression of the polypeptide of interest in cells or body fluid of an individual using one or more antibodies specific to the polypeptide interest and (b) comparing the level of gene expression with a standard gene expression level, whereby an increase or decrease in the assayed polypeptide gene expression level compared to the standard expression level is indicative of a particular disorder. With respect to cancer, the presence of a relatively high amount of transcript in biopsied tissue from an individual may indicate a predisposition for the development of the disease, or may provide a means for detecting the disease prior to the appearance of actual clinical symptoms. A more definitive diagnosis of this type may allow health professionals to employ preventative measures or aggressive treatment earlier thereby preventing the development or further progression of the cancer.

[0328] Antibodies of the invention can be used to assay protein levels in a biological sample using classical immunohistological methods known to those of skill in the art (e.g., see Jalkanen et al., J. Cell. Biol. 101:976-985 (1985); Jalkanen et al., J. Cell. Biol. 105:3087-3096 (1987)). Other antibody-based methods useful for detecting protein gene expression include immunoassays, such as the enzyme linked immunosorbent assay (ELISA) and the radioimmunoassay (RIA). Suitable antibody assay labels are known in the art and include enzyme labels, such as, glucose oxidase; radioisotopes, such as iodine (125I, 121I), carbon (14C), sulfur (35S), tritium (3H), indium (112In), and technetium (99Tc); luminescent labels, such as luminol; and fluorescent labels, such as fluorescein and rhodamine, and biotin.

[0329] One facet of the invention is the detection and diagnosis of a disease or disorder associated with aberrant expression of a polypeptide of interest in an animal, preferably a mammal and most preferably a human. A preferred embodiment of the invention is the detection and diagnosis of a disease or disorder of the colorectal cancer associated with aberrant expression of a colorectal cancer antigen in an animal, preferably a mammal and most preferably a human. In one embodiment, diagnosis comprises: a) administering (for example, parenterally, subcutaneously, or intraperitoneally) to a subject an effective amount of a labeled molecule which specifically binds to the polypeptide of interest; b) waiting for a time interval following the administering for permitting the labeled molecule to preferentially concentrate at sites in the subject where the polypeptide is expressed (and for unbound labeled molecule to be cleared to background level); c) determining background level; and d) detecting the labeled molecule in the subject, such that detection of labeled molecule above the background level indicates that the subject has a particular disease or disorder associated with aberrant expression of the polypeptide of interest. Background level can be determined by various methods including, comparing the amount of labeled molecule detected to a standard value previously determined for a particular system.

[0330] It will be understood in the art that the size of the subject and the imaging system used will determine the quantity of imaging moiety needed to produce diagnostic images. In the case of a radioisotope moiety, for a human subject, the quantity of radioactivity injected will normally range from about 5 to 20 millicuries of 99mTc. The labeled antibody or antibody fragment will then preferentially accumulate at the location of cells which contain the specific protein. In vivo tumor imaging is described in S. W. Burchiel et al., “Immunopharmacokinetics of Radiolabeled Antibodies and Their Fragments.” (Chapter 13 in Tumor Imaging: The Radiochemical Detection of Cancer, S. W. Burchiel and B. A. Rhodes, eds., Masson Publishing Inc. (1982)).

[0331] Depending on several variables, including the type of label used and the mode of administration, the time interval following the administration for permitting the labeled molecule to preferentially concentrate at sites in the subject and for unbound labeled molecule to be cleared to background level is 6 to 48 hours or 6 to 24 hours or 6 to 12 hours. In another embodiment the time interval following administration is 5 to 20 days or 5 to 10 days.

[0332] In an embodiment, monitoring of the disease or disorder is carried out by repeating the method for diagnosing the disease or disorder, for example, one month after initial diagnosis, six months after initial diagnosis, one year after initial diagnosis, etc.

[0333] Presence of the labeled molecule can be detected in the patient using methods known in the art for in vivo scanning. These methods depend upon the type of label used. Skilled artisans will be able to determine the appropriate method for detecting a particular label. Methods and devices that may be used in the diagnostic methods of the invention include, but are not limited to, computed tomography (CT), whole body scan such as position emission tomography (PET), magnetic resonance imaging (MRI), and sonography.

[0334] In a specific embodiment, the molecule is labeled with a radioisotope and is detected in the patient using a radiation responsive surgical instrument (Thurston et al., U.S. Pat. No. 5,441,050). In another embodiment, the molecule is labeled with a fluorescent compound and is detected in the patient using a fluorescence responsive scanning instrument. In another embodiment, the molecule is labeled with a positron emitting metal and is detected in the patent using positron emission-tomography. In yet another embodiment, the molecule is labeled with a paramagnetic label and is detected in a patient using magnetic resonance imaging (MRI).

[0335] Kits

[0336] The present invention provides kits that can be used in the above methods. In one embodiment, a kit comprises an antibody of the invention, preferably a purified antibody, in one or more containers. In a specific embodiment, the kits of the present invention contain a substantially isolated polypeptide comprising an epitope which is specifically immunoreactive with an antibody included in the kit. Preferably, the kits of the present invention further comprise a control antibody which does not react with the polypeptide of interest. In another specific embodiment, the kits of the present invention contain a means for detecting the binding of an antibody to a polypeptide of interest (e.g., the antibody may be conjugated to a detectable substrate such as a fluorescent compound, an enzymatic substrate, a radioactive compound or a luminescent compound, or a second antibody which recognizes the first antibody may be conjugated to a detectable substrate).

[0337] In another specific embodiment of the present invention, the kit is a diagnostic kit for use in screening serum containing antibodies specific against proliferative and/or cancerous polynucleotides and polypeptides. Such a kit may include a control antibody that does not react with the polypeptide of interest. Such a kit may include a substantially isolated polypeptide antigen comprising an epitope, which is specifically immunoreactive with at least one anti-polypeptide antigen antibody. Further, such a kit includes means for detecting the binding of said antibody to the antigen (e.g., the antibody may be conjugated to a fluorescent compound such as fluorescein or rhodamine, which can be detected by flow cytometry). In specific embodiments, the kit may include a recombinantly produced or chemically synthesized polypeptide antigen. The polypeptide antigen of the kit may also be attached to a solid support.

[0338] In a more specific embodiment the detecting means of the above-described kit includes a solid support to which said polypeptide antigen is attached. Such a kit may also include a non-attached reporter-labeled anti-human antibody. In this embodiment, binding of the antibody to the polypeptide antigen can be detected by binding of the said reporter-labeled antibody.

[0339] In an additional embodiment, the invention includes a diagnostic kit for use in screening serum containing antigens of the polypeptide of the invention. The diagnostic kit includes a substantially isolated antibody specifically immunoreactive with polypeptide or polynucleotide antigens, and means for detecting the binding of the polynucleotide or polypeptide antigen to the antibody. In one embodiment, the antibody is attached to a solid support. In a specific embodiment, the antibody may be a monoclonal antibody. The detecting means of the kit may include a second, labeled monoclonal antibody. Alternatively, or in addition, the detecting means may include a labeled, competing antigen.

[0340] In one diagnostic configuration, test serum is reacted with a solid phase reagent having a surface-bound antigen obtained by the methods of the present invention. After binding with specific antigen antibody to the reagent and removing unbound serum components by washing, the reagent is reacted with reporter-labeled anti-human antibody to bind reporter to the reagent in proportion to the amount of bound anti-antigen antibody on the solid support. The reagent is again washed to remove unbound labeled antibody, and the amount of reporter associated with the reagent is determined. Typically, the reporter is an enzyme, which is detected by incubating the solid phase in the presence of a suitable fluorometric, luminescent or colorimetric substrate (Sigma, St. Louis, Mo.).

[0341] The solid surface reagent in the above assay is prepared by known techniques for attaching protein material to solid support material, such as polymeric beads, dip sticks, 96-well plate or filter material. These attachment methods generally include non-specific adsorption of the protein to the support or covalent attachment of the protein, typically through a free amine group, to a chemically reactive group on the solid support, such as an activated carboxyl, hydroxyl, or aldehyde group. Alternatively, streptavidin coated plates can be used in conjunction with biotinylated antigen(s).

[0342] Thus, the invention provides an assay system or kit for carrying out this diagnostic method. The kit generally includes a support with surface-bound recombinant antigens, and a reporter-labeled anti-human antibody for detecting surface-bound anti-antigen antibody.

[0343] Uses of the Polynucleotides

[0344] Each of the polynucleotides identified herein can be used in numerous ways as reagents. The following description should be considered exemplary and utilizes known techniques.

[0345] The polynucleotides of the present invention are useful for chromosome identification. There exists an ongoing need to identify new chromosome markers, since few chromosome marking reagents, based on actual sequence data (repeat polymorphisms), are presently available. Each sequence is specifically targeted to and can hybridize with a particular location on an individual human chromosome, thus each polynucleotide of the present invention can routinely be used as a chromosome marker using techniques known in the art. Table 1A, column 8 provides the chromosome location of some of the polynucleotides of the invention.

[0346] Briefly, sequences can be mapped to chromosomes by preparing PCR primers (preferably at least 15 bp (e.g., 15-25 bp) from the sequences shown in SEQ ID NO:X. Primers can optionally be selected using computer analysis so that primers do not span more than one predicted exon in the genomic DNA. These primers are then used for PCR screening of somatic cell hybrids containing individual human chromosomes. Only those hybrids containing the human gene corresponding to SEQ ID NO:X will yield an amplified fragment.

[0347] Similarly, somatic hybrids provide a rapid method of PCR mapping the polynucleotides to particular chromosomes. Three or more clones can be assigned per day using a single thermal cycler. Moreover, sublocalization of the polynucleotides can be achieved with panels of specific chromosome fragments. Other gene mapping strategies that can be used include in situ hybridization, prescreening with labeled flow-sorted chromosomes, preselection by hybridization to construct chromosome specific-cDNA libraries, and computer mapping techniques (See, e.g., Shuler, Trends Biotechnol 16:456-459 (1998) which is hereby incorporated by reference in its entirety).

[0348] Precise chromosomal location of the polynucleotides can also be achieved using fluorescence in situ hybridization (FISH) of a metaphase chromosomal spread. This technique uses polynucleotides as short as 500 or 600 bases; however, polynucleotides 2,000-4,000 bp are preferred. For a review of this technique, see Verma et al., “Human Chromosomes: a Manual of Basic Techniques,” Pergamon Press, New York (1988).

[0349] For chromosome mapping, the polynucleotides can be used individually (to mark a single chromosome or a single site on that chromosome) or in panels (for marking multiple sites and/or multiple chromosomes).

[0350] Thus, the present invention also provides a method for chromosomal localization which involves (a) preparing PCR primers from the polynucleotide sequences in Table 1A and/or Table 2 and SEQ ID NO:X and (b) screening somatic cell hybrids containing individual chromosomes.

[0351] The polynucleotides of the present invention would likewise be useful for radiation hybrid mapping, HAPPY mapping, and long range restriction mapping. For a review of these techniques and others known in the art, see, e.g. Dear, “Genome Mapping: A Practical Approach,” IRL Press at Oxford University Press, London (1997); Aydin, J. Mol. Med. 77:691-694 (1999); Hacia et al., Mol. Psychiatry 3:483-492 (1998); Herrick et al., Chromosome Res. 7:409-423 (1999); Hamilton et al., Methods Cell Biol. 62:265-280 (2000); and/or Ott, J. Hered. 90:68-70 (1999), each of which is hereby incorporated by reference in its entirety.

[0352] Once a polynucleotide has been mapped to a precise chromosomal location, the physical position of the polynucleotide can be used in linkage analysis. Linkage analysis establishes coinheritance between a chromosomal location and presentation of a particular disease. (Disease mapping data are found, for example, in V. McKusick, Mendelian Inheritance in Man (available on line through Johns Hopkins University Welch Medical Library).) Column 9 of Table 1A provides an OMIM reference identification number of diseases associated with the cytologic band disclosed in column 8 of Table 1A, as determined using techniques described herein and by reference to Table 5. Assuming 1 megabase mapping resolution and one gene per 20 kb, a cDNA precisely localized to a chromosomal region associated with the disease could be one of 50-500 potential causative genes.

[0353] Thus, once coinheritance is established, differences in a polynucleotide of the invention and the corresponding gene between affected and unaffected individuals can be examined. First, visible structural alterations in the chromosomes, such as deletions or translocations, are examined in chromosome spreads or by PCR. If no structural alterations exist, the presence of point mutations are ascertained. Mutations observed in some or all affected individuals, but not in normal individuals, indicate that the mutation may cause the disease. However, complete sequencing of the polypeptide and the corresponding gene from several normal individuals is required to distinguish the mutation from a polymorphism. If a new polymorphism is identified, this polymorphic polypeptide can be used for further linkage analysis.

[0354] Furthermore, increased or decreased expression of the gene in affected individuals as compared to unaffected individuals can be assessed using the polynucleotides of the invention. Any of these alterations (altered expression, chromosomal rearrangement, or mutation) can be used as a diagnostic or prognostic marker. Diagnostic and prognostic methods, kits and reagents encompassed by the present invention are briefly described below and more thoroughly elsewhere herein (see e.g., the sections labeled “Antibodies”, “Diagnostic Assays”, and “Methods for Detecting Colorectal Disease, Including Cancer”).

[0355] Thus, the invention also provides a diagnostic method useful during diagnosis of a disorder, involving measuring the expression level of polynucleotides of the present invention in cells or body fluid from an individual and comparing the measured gene expression level with a standard level of polynucleotide expression level, whereby an increase or decrease in the gene expression level compared to the standard is indicative of a disorder. Additional non-limiting examples of diagnostic methods encompassed by the present invention are more thoroughly described elsewhere herein (see, e.g., Example 12).

[0356] In still another embodiment, the invention includes a kit for analyzing samples for the presence of proliferative and/or cancerous polynucleotides derived from a test subject, as further described herein. In a general embodiment, the kit includes at least one polynucleotide probe containing a nucleotide sequence that will specifically hybridize with a polynucleotide of the invention and a suitable container. In a specific embodiment, the kit includes two polynucleotide probes defining an internal region of the polynucleotide of the invention, where each probe has one strand containing a 31′mer-end internal to the region. In a further embodiment, the probes may be useful as primers for polymerase chain reaction amplification.

[0357] Where a diagnosis of a related disorder, including, for example, diagnosis of a tumor, has already been made according to conventional methods, the present invention is useful as a prognostic indicator, whereby patients exhibiting enhanced or depressed polynucleotide of the invention expression will experience a worse clinical outcome relative to patients expressing the gene at a level nearer the standard level.

[0358] By “measuring the expression level of polynucleotides of the invention” is intended qualitatively or quantitatively measuring or estimating the level of the polypeptide of the invention or the level of the mRNA encoding the polypeptide of the invention in a first biological sample either directly (e.g., by determining or estimating absolute protein level or mRNA level) or relatively (e.g., by comparing to the polypeptide level or mRNA level in a second biological sample). Preferably, the polypeptide level or mRNA level in the first biological sample is measured or estimated and compared to a standard polypeptide level or mRNA level, the standard being taken from a second biological sample obtained from an individual not having the related disorder or being determined by averaging levels from a population of individuals not having a related disorder. As will be appreciated in the art., once a standard polypeptide level or mRNA level is known, it can be used repeatedly as a standard for comparison.

[0359] By “biological sample” is intended any biological sample obtained from an individual, body fluid, cell line, tissue culture, or other source which contains polypeptide of the present invention or the corresponding mRNA. As indicated, biological samples include body fluids (such as semen, lymph, vaginal pool, sera, plasma, urine, synovial fluid and spinal fluid) which contain the polypeptide of the present invention, and tissue sources found to express the polypeptide of the present invention. Methods for obtaining tissue biopsies and body fluids from mammals are well known in the art. Where the biological sample is to include mRNA, a tissue biopsy is the preferred source.

[0360] The method(s) provided above may preferably be applied in a diagnostic method and/or kits in which polynucleotides and/or polypeptides of the invention are attached to a solid support. In one exemplary method, the support may be a “gene chip” or a “biological chip” as described in U.S. Pat. Nos. 5,837,832, 5,874,219, and 5,856,174. Further, such a gene chip with polynucleotides of the invention attached may be used to identify polymorphisms between the isolated polynucleotide sequences of the invention, with polynucleotides isolated from a test subject. The knowledge of such polymorphisms (i.e., their location, as well as, their existence) would be beneficial in identifying disease loci for many disorders, such as for example, in neural disorders, immune system disorders, muscular disorders, reproductive disorders, gastrointestinal disorders, pulmonary disorders, digestive disorders, cardiovascular disorders, renal disorders, proliferative disorders, and/or cancerous diseases and conditions. Such a method is described in U.S. Pat. Nos. 5,858,659 and 5,856,104. The U.S. patents referenced supra are hereby incorporated by reference in their entirety herein.

[0361] The present invention encompasses polynucleotides of the present invention that are chemically synthesized, or reproduced as peptide nucleic acids (PNA), or according to other methods known in the art. The use of PNAs would serve as the preferred form if the polynucleotides of the invention are incorporated onto a solid support, or gene chip. For the purposes of the present invention, a peptide nucleic acid (PNA) is a polyamide type of DNA analog and the monomeric units for adenine, guanine, thymine and cytosine are available commercially (Perceptive Biosystems). Certain components of DNA, such as phosphorus, phosphorus oxides, or deoxyribose derivatives, are not present in PNAs. As disclosed by Nielsen et al., Science 254:1497 (1991); and Egholm et al., Nature 365:666 (1993), PNAs bind specifically and tightly to complementary DNA strands and are not degraded by nucleases. In fact, PNA binds more strongly to DNA than DNA itself does. This is probably because there is no electrostatic repulsion between the two strands, and also the polyamide backbone is more flexible. Because of this, PNA/DNA duplexes bind under a wider range of stringency conditions than DNA/DNA duplexes, making it easier to perform multiplex hybridization. Smaller probes can be used than with DNA due to the strong binding. In addition, it is more likely that single base mismatches can be determined with PNA/DNA hybridization because a single mismatch in a PNA/DNA 1 5-mer lowers the melting point (T.sub.m) by 8°-20° C., vs. 4°-16° C. for the DNA/DNA 15-mer duplex. Also, the absence of charge groups in PNA means that hybridization can be done at low ionic strengths and reduce possible interference by salt during the analysis.

[0362] The compounds of the present invention have uses which include, but are not limited to, detecting cancer in mammals. In particular the invention is useful during diagnosis of pathological cell proliferative neoplasias which include, but are not limited to: acute myelogenous leukemias including acute monocytic leukemia, acute myeloblastic leukemia, acute promyelocytic leukemia, acute myelomonocytic leukemia, acute erythroleukemia, acute megakaryocytic leukemia, and acute undifferentiated leukemia, etc.; and chronic myelogenous leukemias including chronic myelomonocytic leukemia, chronic granulocytic leukemia, etc. Preferred mammals include monkeys, apes, cats, dogs, cows, pigs, horses, rabbits and humans. Particularly preferred are humans.

[0363] The compounds of the present invention have preferred uses which include, but are not limited to, detecting colorectal cancer in mammals. In particular the invention is useful during diagnosis of pathological cell proliferative neoplasias, which include, but are not limited to: colon cancer, adenomatous colon polyps (e.g., villous adenoma), colon carcinoma, colorectal cancer, and/or as described under “Gastrointestinal Disorders” below. Preferred mammals include monkeys, apes, cats, dogs, cows, pigs, horses, rabbits and humans. Particularly preferred are humans.

[0364] Pathological cell proliferative disorders are often associated with inappropriate activation of proto-oncogenes. (Gelmann, E. P. et al., “The Etiology of Acute Leukemia: Molecular Genetics and Viral Oncology,” in Neoplastic Diseases of the Blood, Vol 1., Wiernik, P. H. et al. eds., 161-182 (1985)). Neoplasias are now believed to result from the qualitative alteration of a normal cellular gene product, or from the quantitative modification of gene expression by insertion into the chromosome of a viral sequence, by chromosomal translocation of a gene to a more actively transcribed region, or by some other mechanism. (Gelmann et al., supra) It is likely that mutated or altered expression of specific genes is involved in the pathogenesis of some leukemias, among other tissues and cell types. (Gelmann et al., supra) Indeed, the human counterparts of the oncogenes involved in some animal neoplasias have been amplified or translocated in some cases of human leukemia and carcinoma. (Gelmann et al., supra)

[0365] For example, c-myc expression is highly amplified in the non-lymphocytic leukemia cell line HL-60. When HL-60 cells are chemically induced to stop proliferation, the level of c-myc is found to be downregulated. (International Publication Number WO 91/15580). However, it has been shown that exposure of HL-60 cells to a DNA construct that is complementary to the 5′ end of c-myc or c-myb blocks translation of the corresponding mRNAs which downregulates expression of the c-myc or c-myb proteins and causes arrest of cell proliferation and differentiation of the treated cells. (International Publication Number WO 91/15580; Wickstrom et al., Proc. Natl. Acad. Sci. 85:1028 (1988); Anfossi et al., Proc. Natl. Acad. Sci. 86:3379 (1989)). However, the skilled artisan would appreciate the present invention's usefulness is not be limited to treatment, prevention, diagnosis and/or prognosis, of proliferative disorders of cells and tissues of hematopoietic origin, in light of the numerous cells and cell types of varying origins which are known to exhibit proliferative phenotypes. In preferred embodiments, the compounds and/or methods of the invention are used to treat, prevent, diagnose, and/or prognose, proliferative disorders of colorectal cells and tissues.

[0366] In addition to the foregoing, a polynucleotide of the present invention can be used to control gene expression through triple helix formation or through antisense DNA or RNA. Antisense techniques are discussed, for example, in Okano, J. Neurochem. 56: 560 (1991); “Oligodeoxynucleotides as Antisense Inhibitors of Gene Expression, CRC Press, Boca Raton, Fla. (1988). Triple helix formation is discussed in, for instance Lee et al., Nucleic Acids Research 6: 3073 (1979); Cooney et al., Science 241:456 (1988); and Dervan et al., Science 251: 1360 (1991). Both methods rely on binding of the polynucleotide to a complementary DNA or RNA. For these techniques, preferred polynucleotides are usually oligonucleotides 20 to 40 bases in length and complementary to either the region of the gene involved in transcription (triple helix—see Lee et al., Nucl. Acids Res. 6:3073 (1979); Cooney et al., Science 241:456 (1988); and Dervan et al., Science 251:1360 (1991)) or to the mRNA itself (antisense—Okano, J. Neurochem. 56:560 (1991); Oligodeoxy-nucleotides as Antisense Inhibitors of Gene Expression, CRC Press, Boca Raton, Fla. (1988).) Triple helix formation optimally results in a shut-off of RNA transcription from DNA, while antisense RNA hybridization blocks translation of an mRNA molecule into polypeptide. The oligonucleotide described above can also be delivered to cells such that the antisense RNA or DNA may be expressed in vivo to inhibit production of polypeptide of the present invention antigens. Both techniques are effective in model systems, and the information disclosed herein can be used to design antisense or triple helix polynucleotides in an effort to treat disease, and in particular, for the treatment of proliferative diseases and/or conditions. Non-limiting antisense and triple helix methods encompassed by the present invention are more thoroughly described elsewhere herein (see, e.g., the section labeled “Antisense and Ribozyme (Antagonists)”).

[0367] Polynucleotides of the present invention are also useful in gene therapy. One goal of gene therapy is to insert a normal gene into an organism having a defective gene, in an effort to correct the genetic defect. The polynucleotides disclosed in the present invention offer a means of targeting such genetic defects in a highly accurate manner. Another goal is to insert a new gene that was not present in the host genome, thereby producing a new trait in the host cell. Additional non-limiting examples of gene therapy methods encompassed by the present invention are more thoroughly described elsewhere herein (see, e.g., the sections labeled “Gene Therapy Methods” and Examples 16, 17 and 18).

[0368] The polynucleotides are also useful for identifying individuals from minute biological samples. The United States military, for example, is considering the use of restriction fragment length polymorphism (RFLP) for identification of its personnel. In this technique, an individual's genomic DNA is digested with one or more restriction enzymes, and probed on a Southern blot to yield unique bands for identifying personnel. This method does not suffer from the current limitations of “Dog Tags” which can be lost, switched, or stolen, making positive identification difficult. The polynucleotides of the present invention can be used as additional DNA markers for RFLP.

[0369] The polynucleotides of the present invention can also be used as an alternative to RFLP, by determining the actual base-by-base DNA sequence of selected portions of an individual's genome. These sequences can be used to prepare PCR primers for amplifying and isolating such selected DNA, which can then be sequenced. Using this technique, individuals can be identified because each individual will have a unique set of DNA sequences. Once an unique ID database is established for an individual, positive identification of that individual, living or dead, can be made from extremely small tissue samples.

[0370] Forensic biology also benefits from using DNA-based identification techniques as disclosed herein. DNA sequences taken from very small biological samples such as tissues, e.g., hair or skin, or body fluids, e.g., blood, saliva, semen, synovial fluid, amniotic fluid, breast milk, lymph, pulmonary sputum or surfactant, urine, fecal matter, etc., can be amplified using PCR. In one prior art technique, gene sequences amplified from polymorphic loci, such as DQa class II HLA gene, are used in forensic biology to identify individuals. (Erlich, H., PCR Technology, Freeman and Co. (1992).) Once these specific polymorphic loci are amplified, they are digested with one or more restriction enzymes, yielding an identifying set of bands on a Southern blot probed with DNA corresponding to the DQa class II HLA gene. Similarly, polynucleotides of the present invention can be used as polymorphic markers for forensic purposes.

[0371] There is also a need for reagents capable of identifying the source of a particular tissue. Such need arises, for example, in forensics when presented with tissue of unknown origin. Appropriate reagents can comprise, for example, DNA probes or primers prepared from the sequences of the present invention, specific to tissues, including but not limited to, those sequences referred to in Table 1A. Panels of such reagents can identify tissue by species and/or by organ type. In a similar fashion, these reagents can be used to screen tissue cultures for contamination. Additional non-limiting examples of such uses are further described herein.

[0372] Because colorectal cancer antigens are found expressed in the colon and rectum, the polynucleotides of the present invention are also useful as hybridization probes for differential identification of the tissue(s) or cell type(s) present in a biological sample. Similarly, polypeptides and antibodies directed to polypeptides of the present invention are useful to provide immunological probes for differential identification of the tissue(s) (e.g., immunohistochemistry assays) or cell type(s) (e.g., immunocytochemistry assays). In a specific embodiment, the polynucleotides of the present invention are also useful as hybridization probes for differential identification of colorectal tissue(s) or cell type(s) present in a biological sample. Similarly, polypeptides and antibodies directed to polypeptides of the present invention are useful to provide immunological probes for differential identification of colorectal tissue(s) (e.g., immunohistochemistry assays) or cell type(s) (e.g., immunocytochemistry assays). In addition, for a number of disorders of the above tissues or cells, significantly higher or lower levels of gene expression of the polynucleotides/polypeptides of the present invention may be detected in certain tissues (e.g., tissues expressing polypeptides and/or polynucleotides of the present invention, for example, normal colorectal or diseased colorectal tissues, and/or those tissues/cells corresponding to the library source relating to a polynucleotide sequence of the invention as disclosed in column 7 of Table 1A, and/or cancerous and/or wounded tissues) or bodily fluids (e.g., semen, lymph, vaginal pool, serum, plasma, urine, synovial fluid or spinal fluid) taken from an individual having such a disorder, relative to a “standard” gene expression level, i.e., the expression level in healthy tissue from an individual not having the disorder.

[0373] Thus, the invention provides a diagnostic method of a disorder, which involves: (a) assaying gene expression level in cells or body fluid of an individual; (b) gcomparing the gene expression level with a standard gene expression level, whereby an increase or decrease in the assayed gene expression level compared to the standard expression level is indicative of a disorder.

[0374] In the very least, the polynucleotides of the present invention can be used as molecular weight markers on Southern gels, as diagnostic probes for the presence of a specific mRNA in a particular cell type, as a probe to “subtract-out” known sequences in the process of discovering novel polynucleotides, for selecting and making oligomers for attachment to a “gene chip” or other support, to raise anti-DNA antibodies using DNA immunization techniques, and as an antigen to elicit an immune response.

[0375] Uses of the Polypeptides

[0376] Each of the polypeptides identified herein can be used in numerous ways. The following description should be considered exemplary and utilizes known techniques.

[0377] Polypeptides and antibodies directed to polypeptides of the present invention are useful to provide immunological probes for differential identification of the tissue(s) (e.g., immunohistochemistry assays such as, for example, ABC immunoperoxidase (Hsu et al., J. Histochem. Cytochem. 29:577-580 (1981)) or cell type(s) (e.g., immunocytochemistry assays).

[0378] Antibodies can be used to assay levels of polypeptides encoded by polynucleotides of the invention in a biological sample using classical immunohistological methods known to those of skill in the art (see, e.g., Jalkanen, et al., J. Cell. Biol. 101:976-985 (1985); Jalkanen, et al., J. Cell. Biol. 105:3087-3096 (1987)). Other antibody-based methods useful for detecting protein gene expression include immunoassays, such as the enzyme linked immunosorbent assay (ELISA) and the radioimmunoassay (RIA). Suitable antibody assay labels are known in the art and include enzyme labels, such as, glucose oxidase; radioisotopes, such as iodine (¹³¹I, ¹²⁵I, ¹²³I, ¹²¹I), carbon (¹⁴C), sulfur (³⁵S), tritium (³H), indium (^{115m}In, ^{113m}In, ¹¹²In, ¹¹¹In), and technetium (⁹⁹Tc, ^{99m}Tc), thallium (²⁰¹Ti), gallium (⁶⁸Ga, ⁶⁷Ga), palladium (¹⁰³Pd), molybdenum (⁹⁹Mo), xenon (¹³³Xe), fluorine (¹⁸F), ¹⁵³Sm, ¹⁷⁷Lu, ¹⁵⁹Gd, ¹⁴⁹Pm, ¹⁴⁰La, ¹⁷⁵Yb, ¹⁶⁶Ho, ⁹⁰Y, ⁴⁷Sc, ¹⁸⁶Re, ¹⁸⁸Re, ¹⁴²Pr, ¹⁰⁵Rh, ⁹⁷Ru; luminescent labels, such as luminol; and fluorescent labels, such as fluorescein and rhodamine, and biotin.

[0379] In addition to assaying levels of polypeptide of the present invention in a biological sample, proteins can also be detected in vivo by imaging. Antibody labels or markers for in vivo imaging of protein include those detectable by X-radiography, NMR or ESR. For X-radiography, suitable labels include radioisotopes such as barium or cesium, which emit detectable radiation but are not overtly harmful to the subject. Suitable markers for NMR and ESR include those with a detectable characteristic spin, such as deuterium, which may be incorporated into the antibody by labeling of nutrients for the relevant hybridoma.

[0380] A colorectal cancer antigen-specific antibody or antibody fragment which has been labeled with an appropriate detectable imaging moiety, such as a radioisotope (for example, ¹³¹I, ¹¹²In, ^{99m}Tc, (¹³¹I, ¹²⁵I, ¹²³I, ¹²¹I), carbon (¹⁴C), sulfur (³⁵S), tritium (³H), indium (^{115m}In, ^{113m}In, ¹²¹In, ¹¹¹In), and technetium (⁹⁹Tc, ^{99m}Tc), thallium (²⁰¹Ti), gallium (⁶⁸Ga, ⁶⁷Ga), palladium (¹⁰³Pd), molybdenum (⁹⁹Mo), xenon (¹³³Xe), fluorine (¹⁸F, ¹⁵³Sm, ¹⁷⁷Lu, ¹⁵⁹Gd, ¹⁴⁹Pm, ¹⁴⁰La, ¹⁷⁵Yb, ¹⁶⁶Ho, ⁹⁰Y, ⁴⁷Sc, ¹⁸⁶Re, ¹⁸⁸Re, ¹⁴²Pr, ¹⁰⁵Rh, ⁹⁷Ru), a radio-opaque substance, or a material detectable by nuclear magnetic resonance, is introduced (for example, parenterally, subcutaneously or intraperitoneally) into the mammal to be examined for colorectal disorder. It will be understood in the art that the size of the subject and the imaging system used will determine the quantity of imaging moiety needed to produce diagnostic images. In the case of a radioisotope moiety, for a human subject, the quantity of radioactivity injected will normally range from about 5 to 20 millicuries of ^{99m}Tc. The labeled antibody or antibody fragment will then preferentially accumulate at the location of cells which express the polypeptide encoded by a polynucleotide of the invention. In vivo tumor imaging is described in S. W. Burchiel et al., “Immunopharmacokinetics of Radiolabeled Antibodies and Their Fragments” (Chapter 13 in Tumor Imaging. The Radiochemical Detection of Cancer, S. W. Burchiel and B. A. Rhodes, eds., Masson Publishing Inc. (1982)).

[0381] In one embodiment, the invention provides a method for the specific delivery of compositions of the invention to cells by administering polypeptides of the invention (e.g., polypeptides encoded by polynucleotides of the invention and/or antibodies) that are associated with heterologous polypeptides or nucleic acids. In one example, the invention provides a method for delivering a therapeutic protein into the targeted cell. In another example, the invention provides a method for delivering a single stranded nucleic acid (e.g., antisense or ribozymes) or double stranded nucleic acid (e.g., DNA that can integrate into the cell's genome or replicate episomally and that can be transcribed) into the targeted cell.

[0382] In another embodiment, the invention provides a method for the specific destruction of cells (e.g., the destruction of tumor cells) by administering polypeptides of the invention in association with toxins or cytotoxic prodrugs.

[0383] In a preferred embodiment, the invention provides a method for the specific destruction of colorectal cells (e.g., aberrant colorectal cells, colorectal neoplasm) by administering polypeptides of the invention (e.g., polypeptides encoded by polynucleotides of the invention and/or antibodies) in association with toxins or cytotoxic prodrugs. In another preferred embodiment the invention provides a method for the specific destruction of tissues/cells corresponding to the library source relating to a polynucleotide sequence of the invention as disclosed in column 7 of Table 1A by administering polypeptides of the invention in association with toxins or cytotoxic prodrugs.

[0384] By “toxin” is meant one or more compounds that bind and activate endogenous cytotoxic effector systems, radioisotopes, holotoxins, modified toxins, catalytic subunits of toxins, or any molecules or enzymes not normally present in or on the surface of a cell that under defined conditions cause the cell's death. Toxins that may be used according to the methods of the invention include, but are not limited to, radioisotopes known in the art, compounds such as, for example, antibodies (or complement fixing containing portions thereof) that bind an inherent or induced endogenous cytotoxic effector system, thymidine kinase, endonuclease, RNAse, alpha toxin, ricin, abrin, Pseudomonas exotoxin A, diphtheria toxin, saporin, momordin, gelonin, pokeweed antiviral protein, alpha-sarcin and cholera toxin. “Toxin” also includes a cytostatic or cytocidal agent, a therapeutic agent or a radioactive metal ion, e.g., alpha-emitters such as, for example, ²¹³Bi, or other radioisotopes such as, for example, ¹⁰³Pd, ¹³³Xe, ¹³¹I, ¹¹¹In, ⁶⁸Ge, ⁵⁷Co, ⁶⁵Zn, ⁸⁵Sr, ³²P, ³⁵S, ⁹⁰Y, ¹⁵³Sm, ¹⁵³Gd, ¹⁶⁹Yb, ⁵¹Cr, ⁵⁴Mn, ⁷⁵Se, ¹¹³Sn, ⁹⁰Yttrium, ¹¹⁷Tin, ¹⁸⁶Rhenium, ¹⁶⁶Holmium, and ¹⁸⁸Rhenium; luminescent labels, such as luminol; and fluorescent labels, such as fluorescein and rhodamine, and biotin.

[0385] In a specific embodiment, the invention provides a method for the specific destruction of cells (e.g., the destruction of tumor cells) by administering polypeptides of the invention or antibodies of the invention in association with the radioisotope ⁹⁰Y. In another specific embodiment, the invention provides a method for the specific destruction of cells (e.g., the destruction of tumor cells) by administering polypeptides of the invention or antibodies of the invention in association with the radioisotope ¹¹¹In. In a further specific embodiment, the invention provides a method for the specific destruction of cells (e.g., the destruction of tumor cells) by administering polypeptides of the invention or antibodies of the invention in association with the radioisotope ¹³¹I.

[0386] Techniques known in the art may be applied to label polypeptides of the invention (including antibodies). Such techniques include, but are not limited to, the use of bifunctional conjugating agents (see e.g., U.S. Pat. Nos. 5,756,065; 5,714,631; 5,696,239; 5,652,361; 5,505,931; 5,489,425; 5,435,990; 5,428,139; 5,342,604; 5,274,119; 4,994,560; and 5,808,003; the contents of each of which are hereby incorporated by reference in its entirety).

[0387] Thus, the invention provides a diagnostic method of a disorder, which involves (a) assaying the expression level of a polypeptide of the present invention in cells or body fluid of an individual; and (b) comparing the assayed polypeptide expression level with a standard polypeptide expression level, whereby an increase or decrease in the assayed polypeptide expression level compared to the standard expression level is indicative of a disorder. With respect to cancer, the presence of a relatively high amount of transcript in biopsied tissue from an individual may indicate a predisposition for the development of the disease, or may provide a means for detecting the disease prior to the appearance of actual clinical symptoms. A more definitive diagnosis of this type may allow health professionals to employ preventative measures or aggressive treatment earlier thereby preventing the development or further progression of the cancer.

[0388] Moreover, polypeptides of the present invention can be used to treat or prevent diseases or conditions of the colon and/or rectum such as, for example, colon cancer, adenomatous colon polyps (e.g., villous adenoma), colon carcinoma, colorectal cancer, and/or as described under “Gastrointestinal Disorders” below. In preferred embodiments, polynucleotides expressed in a particular tissue type (see, e.g., Table 1A, column 7) are used to diagnose, detect, prevent, treat and/or prognose disorders associated with the tissue type. For example, patients can be administered a polypeptide of the present invention in an effort to replace absent or decreased levels of the polypeptide (e.g., insulin), to supplement absent or decreased levels of a different polypeptide (e.g., hemoglobin S for hemoglobin B, SOD, catalase, DNA repair proteins), to inhibit the activity of a polypeptide (e.g., an oncogene or tumor supressor), to activate the activity of a polypeptide (e.g., by binding to a receptor), to reduce the activity of a membrane bound receptor by competing with it for free ligand (e.g., soluble TNF receptors used in reducing inflammation), or to bring about a desired response (e.g., blood vessel growth inhibition, enhancement of the immune response to proliferative cells or tissues).

[0389] Similarly, antibodies directed to a polypeptide of the present invention can also be used to treat disease (as described supra, and elsewhere herein). For example, administration of an antibody directed to a polypeptide of the present invention can bind, and/or neutralize the polypeptide, and/or reduce overproduction of the polypeptide. Similarly, administration of an antibody can activate the polypeptide, such as by binding to a polypeptide bound to a membrane (receptor).

[0390] At the very least, the polypeptides of the present invention can be used as molecular weight markers on SDS-PAGE gels or on molecular sieve gel filtration columns using methods well known to those of skill in the art. Polypeptides can also be used to raise antibodies, which in turn are used to measure protein expression from a recombinant cell, as a way of assessing transformation of the host cell. Moreover, the polypeptides of the present invention can be used to test the biological activities described herein.

[0391] Diagnostic Asssays

[0392] The compounds of the present invention are useful for diagnosis, treatment, prevention and/or prognosis of various colorectal related disorders in mammals, preferably humans. Such disorders include, but are not limited to, colon cancer, adenomatous colon polyps (e.g., villous adenoma), colon carcinoma, colorectal cancer, and/or as described under “Gastrointestinal Disorders” below. In preferred embodiments, polynucleotides expressed in a particular tissue type (see, e.g., Table 1A, column 7) are used to diagnose, detect, prevent, treat and/or prognose disorders associated with the tissue type.

[0393] Colorectal cancer antigens are expressed in the colon and/or rectum. For a number of colorectal-related disorders, substantially altered (increased or decreased) levels of colorectal cancer antigen gene expression can be detected in colorectal tissue or other cells or bodily fluids (e.g., sera, plasma, urine, semen, synovial fluid or spinal fluid) taken from an individual having such a disorder, relative to a “standard” colorectal antigen gene expression level, that is, the colorectal cancer antigen expression level in colorectal tissues or bodily fluids from an individual not having the colorectal disorder. Thus, the invention provides a diagnostic method useful during diagnosis of a colorectal disorder, which involves measuring the expression level of the gene encoding the colorectal cancer associated polypeptide in colorectal tissue or other cells or body fluid from an individual and comparing the measured gene expression level with a standard colorectal antigens gene expression level, whereby an increase or decrease in the gene expression level(s) compared to the standard is indicative of a colorectal disorder.

[0394] In specific embodiments, the invention provides a diagnostic method useful during diagnosis of a disorder of a normal or diseased tissue/cell source corresponding to column 7 of Table 1A, which involves measuring the expression level of the coding sequence of a polynucleotide sequence associated with this tissue/cell source as disclosed in Table 1A in the tissue/cell source or other cells or body fluid from an individual and comparing the expression level of the coding sequence with a standard expression level of the coding sequence of a polynucleotide sequence, whereby an increase or decrease in the gene expression level(s) compared to the standard is indicative of a disorder of a normal or diseased tissue/cell source corresponding to column 7 of Table 1A.

[0395] In particular, it is believed that certain tissues in mammals with cancer of cells or tissue of the colon and/or rectum express significantly enhanced or reduced levels of normal or altered colorectal cancer antigen expression and mRNA encoding the colorectal cancer associated polypeptide when compared to a corresponding “standard” level. Further, it is believed that enhanced or depressed levels of the colorectal cancer associated polypeptide can be detected in certain body fluids (e.g., sera, plasma, urine, and spinal fluid) or cells or tissue from mammals with such a cancer when compared to sera from mammals of the same species not having the cancer.

[0396] For example, as disclosed herein, colorectal cancer associated polypeptides of the invention are expressed in the colon and/or rectum. Accordingly, polynucleotides of the invention (e.g., polynucleotide sequences complementary to all or a portion of a colorectal cancer antigen mRNA nucleotide sequence of SEQ ID NO:X, nucleotide sequence encoding SEQ ID NO:Y, nucleotide sequence encoding a polypeptide encoded by SEQ ID NO:X and/or a nucleotide sequence delineated by columns 8 and 9 of Table 2) and antibodies (and antibody fragments) directed against the polypeptides of the invention may be used to quantitate or qualitate concentrations of cells of the colon and/or rectum expressing colorectal cancer antigens, preferrably on their cell surfaces. These polynucleotides and antibodies additionally have diagnostic applications in detecting abnormalities in the level of colorectal cancer antigens gene expression, or abnormalities in the structure and/or temporal, tissue, cellular, or subcellular location of colorectal cancer antigens. These diagnostic assays may be performed in vivo or in vitro, such as, for example, on blood samples, biopsy tissue or autopsy tissue. In specific embodiments, polynucleotides and antibodies of the invention are used to quantitate or qualitate tissues/cells corresponding to the library source disclosed in column 7 of Table 1A expressing the corresponding colorectal cancer sequence disclosed in the same row of Table 1A, preferrably on their cell surface.

[0397] Thus, the invention provides a diagnostic method useful during diagnosis of a colorectal disorder, including cancers, which involves measuring the expression level of the gene encoding the colorectal cancer antigen polypeptide in colorectal tissue or other cells or body fluid from an individual and comparing the measured gene expression level with a standard colorectal cancer antigen gene expression level, whereby an increase or decrease in the gene expression level compared to the standard is indicative of a colorectal disorder. In specific embodiments, polynucleotides and antibodies of the invention are used to quantitate or qualitate tissues/cells corresponding to the library source disclosed in colurmn 7 of Table 1A expressing the corresponding colorectal cancer sequence disclosed in the same row of Table 1A, preferrably on their cell surface.

[0398] Where a diagnosis of a disorder in the colon and/or rectum, including diagnosis of a tumor, has already been made according to conventional methods, the present invention is useful as a prognostic indicator, whereby patients exhibiting enhanced or depressed colorectal cancer antigen gene expression will experience a worse clinical outcome relative to patients expressing the gene at a level nearer the standard level.

[0399] By “assaying the expression level of the gene encoding the colorectal cancer associated polypeptide” is intended qualitatively or quantitatively measuring or estimating the level of the colorectal cancer antigen polypeptide or the level of the mRNA encoding the colorectal cancer antigen polypeptide in a first biological sample either directly (e.g., by determining or estimating absolute protein level or mRNA level) or relatively (e.g., by comparing to the colorectal cancer associated polypeptide level or mRNA level in a second biological sample). Preferably, the colorectal cancer antigen polypeptide expression level or mRNA level in the first biological sample is measured or estimated and compared to a standard colorectal cancer antigen polypeptide level or mRNA level, the standard being taken from a second biological sample obtained from an individual not having the disorder or being determined by averaging levels from a population of individuals not having a disorder of the colon and/or rectum. As will be appreciated in the art, once a standard colorectal cancer antigen polypeptide level or mRNA level is known, it can be used repeatedly as a standard for comparison.

[0400] By “biological sample” is intended any biological sample obtained from an individual, cell line, tissue culture, or other source containing colorectal cancer antigen polypeptides (including portions thereof) or rnRNA. As indicated, biological samples include body fluids (such as sera, plasma, urine, synovial fluid and spinal fluid) which contain cells expressing colorectal cancer antigen polypeptides, colorectal tissue, and other tissue sources found to express the full length or fragments thereof of a colorectal cancer antigen. Methods for obtaining tissue biopsies and body fluids from mammals are well known in the art. Where the biological sample is to include rnRNA, a tissue biopsy is the preferred source.

[0401] Total cellular RNA can be isolated from a biological sample using any suitable technique such as the single-step guanidinium-thiocyanate-phenol-chloroform method described in Chomczynski and Sacchi, Anal. Biochem. 162:156-159 (1987). Levels of mRNA encoding the colorectal cancer antigen polypeptides are then assayed using any appropriate method. These include Northern blot analysis, S1 nuclease mapping, the polymerase chain reaction (PCR), reverse transcription in combination with the polymerase chain reaction (RT-PCR), and reverse transcription in combination with the ligase chain reaction (RT-LCR).

[0402] The present invention also relates to diagnostic assays such as quantitative and diagnostic assays for detecting levels of colorectal cancer antigen polypeptides, in a biological sample (e.g., cells and tissues), including determination of normal and abnormal levels of polypeptides. Thus, for instance, a diagnostic assay in accordance with the invention for detecting over-expression of colorectal cancer antigens compared to normal control tissue samples may be used to detect the presence of tumors. Assay techniques that can be used to determine levels of a polypeptide, such as a colorectal cancer antigen polypeptide of the present invention in a sample derived from a host are well-known to those of skill in the art. Such assay methods include radioimmunoassays, competitive-binding assays, Western Blot analysis and ELISA assays. Assaying colorectal cancer antigen polypeptide levels in a biological sample can occur using any art-known method.

[0403] Assaying colorectal cancer antigen polypeptide levels in a biological sample can occur using antibody-based techniques. For example, colorectal cancer antigen polypeptide expression in tissues can be studied with classical immunohistological methods (Jalkanen et al., J. Cell. Biol. 101:976-985 (1985); Jalkanen, M., et al., J. Cell . Biol. 105:3087-3096 (1987)). Other antibody-based methods useful for detecting colorectal cancer antigen polypeptide gene expression include immunoassays, such as the enzyme linked immunosorbent assay (ELISA) and the radioimmunoassay (RIA). Suitable antibody assay labels are known in the art and include enzyme labels, such as, glucose oxidase, and radioisotopes, such as iodine (¹²⁵I, ¹²¹I), carbon (¹⁴C), sulfur (³⁵S), tritium (³H), indium (¹¹²In), and technetium (^{99m}Tc), and fluorescent labels, such as fluorescein and rhodamine, and biotin.

[0404] The tissue or cell type to be analyzed will generally include those which are known, or suspected, to express the colorectal cancer antigen gene (such as, for example, cells of the colon and/ore rectum or colorectal cancer). The protein isolation methods employed herein may, for example, be such as those described in Harlow and Lane (Harlow, E. and Lane, D., 1988, “Antibodies: A Laboratory Manual”, Cold Spring Harbor Laboratory Press, Cold Spring Harbor, N.Y.), which is incorporated herein by reference in its entirety. The isolated cells can be derived from cell culture or from a patient. The analysis of cells taken from culture may be a necessary step in the assessment of cells that could be used as part of a cell-based gene therapy technique or, alternatively, to test the effect of compounds on the expression of the colorectal cancer antigen gene.

[0405] For example, antibodies, or fragments of antibodies, such as those described herein, may be used to quantitatively or qualitatively detect the presence of colorectal cancer antigen gene products or conserved variants or peptide fragments thereof. This can be accomplished, for example, by immunofluorescence techniques employing a fluorescently labeled antibody coupled with light microscopic, flow cytometric, or fluorimetric detection.

[0406] In a preferred embodiment, antibodies, or fragments of antibodies directed to any one or all of the predicted epitope domains of the colorectal cancer antigen polypeptides (Shown in Table 1A, column 6) may be used to quantitatively or qualitatively detect the presence of colorectal cancer antigen gene products or conserved variants or peptide fragments thereof. This can be accomplished, for example, by immunofluorescence techniques employing a fluorescently labeled antibody coupled with light microscopic, flow cytometric, or fluorimetric detection.

[0407] In an additional preferred embodiment, antibodies, or fragments of antibodies directed to a conformational epitope of a colorectal cancer antigen may be used to quantitatively or qualitatively detect the presence of colorectal cancer antigen gene products or conserved variants or peptide fragments thereof. This can be accomplished, for example, by immunofluorescence techniques employing a fluorescently labeled antibody coupled with light microscopic, flow cytometric, or fluorimetric detection.

[0408] The antibodies (or fragments thereof), and/or colorectal cancer antigen polypeptides of the present invention may, additionally, be employed histologically, as in immunofluorescence, immunoelectron microscopy or non-immunological assays, for in situ detection of colorectal cancer antigen gene products or conserved variants or peptide fragments thereof. In situ detection may be accomplished by removing a histological specimen from a patient, and applying thereto a labeled antibody or colorectal cancer antigen polypeptide of the present invention. The antibody (or fragment thereof) or colorectal cancer antigen polypeptide is preferably applied by overlaying the labeled antibody (or fragment) onto a biological sample. Through the use of such a procedure, it is possible to determine not only the presence of the colorectal cancer antigen gene product, or conserved variants or peptide fragments, or colorectal cancer antigen polypeptide binding, but also its distribution in the examined tissue. Using the present invention, those of ordinary skill will readily perceive that any of a wide variety of histological methods (such as staining procedures) can be modified in order to achieve such in situ detection.

[0409] Immunoassays and non-immunoassays for colorectal cancer antigen gene products or conserved variants or peptide fragments thereof will typically comprise incubating a sample, such as a biological fluid, a tissue extract, freshly harvested cells, or lysates of cells which have been incubated in cell culture, in the presence of a detectably labeled antibody capable of binding colorectal cancer antigen gene products or conserved variants or peptide fragments thereof, and detecting the bound antibody by any of a number of techniques well-known in the art.

[0410] The biological sample may be brought in contact with and immobilized onto a solid phase support or carrier such as nitrocellulose, or other solid support which is capable of immobilizing cells, cell particles or soluble proteins. The support may then be washed with suitable buffers followed by treatment with the detectably labeled anti-colorectal cancer antigen antibody or detectable colorectal cancer antigen polypeptide. The solid phase support may then be washed with the buffer a second time to remove unbound antibody or polypeptide. Optionally the antibody is subsequently labeled. The amount of bound label on solid support may then be detected by conventional means.

[0411] By “solid phase support or carrier” is intended any support capable of binding an antigen or an antibody. Well-known supports or carriers include glass, polystyrene, polypropylene, polyethylene, dextran, nylon, amylases, natural and modified celluloses, polyacrylamides, gabbros, and magnetite. The nature of the carrier can be either soluble to some extent or insoluble for the purposes of the present invention. The support material may have virtually any possible structural configuration so long as the coupled molecule is capable of binding to an antigen or antibody. Thus, the support configuration may be spherical, as in a bead, or cylindrical, as in the inside surface of a test tube, or the external surface of a rod. Alternatively, the surface may be flat such as a sheet, test strip, etc. Preferred supports include polystyrene beads. Those skilled in the art will know many other suitable carriers for binding antibody or antigen, or will be able to ascertain the same by use of routine experimentation.

[0412] The binding activity of a given lot of anti-colorectal cancer antigen antibody or colorectal cancer antigen polypeptide may be determined according to well known methods. Those skilled in the art will be able to determine operative and optimal assay conditions for each determination by employing routine experimentation.

[0413] In addition to assaying colorectal cancer antigen polypeptide levels or polynucleotide levels in a biological sample obtained from an individual, colorectal cancer antigen polypeptide or polynucleotide can also be detected in vivo by imaging. For example, in one embodiment of the invention, colorectal cancer antigen polypeptide and/or anti-colorectal cancer antigen antibodies are used to image colorectal diseased cells, such as neoplasms. In another embodiment, colorectal cancer antigen polynucleotides of the invention (e.g., polynucleotides complementary to all or a portion of colorectal cancer antigen MRNA) and/or anti-colorectal cancer antigen antibodies (e.g., antibodies directed to any one or a combination of the epitopes of colorectal cancer antigens, antibodies directed to a conformational epitope of colorectal cancer antigens, antibodies directed to the full length polypeptide expressed on the cell surface of a mammalian cell) are used to image diseased or neoplastic cells of the colon and/or rectum.

[0414] Antibody labels or markers for in vivo imaging of colorectal cancer antigen polypeptides include those detectable by X-radiography, NMR, MRI, CAT-scans or ESR. For X-radiography, suitable labels include radioisotopes such as barium or cesium, which emit detectable radiation but are not overtly harmful to the subject. Suitable markers for NMR and ESR include those with a detectable characteristic spin, such as deuterium, which may be incorporated into the antibody by labeling of nutrients for the relevant hybridoma. Where in vivo imaging is used to detect enhanced levels of colorectal cancer antigen polypeptides for diagnosis in humans, it may be preferable to use human antibodies or “humanized” chimeric monoclonal antibodies. Such antibodies can be produced using techniques described herein or otherwise known in the art. For example methods for producing chimeric antibodies are known in the art. See, for review, Morrison, Science 229:1202 (1985); Oi et al., BioTechniques 4:214 (1986); Cabilly et al., U.S. Pat. No. 4,816,567; Taniguchi et al., EP 171496; Morrison et al., EP 173494; Neuberger et al., WO 8601533; Robinson et al., WO 8702671; Boulianne et al., Nature 312:643 (1984); Neuberger et al., Nature 314:268 (1985).

[0415] Additionally, any colorectal cancer antigen polypeptides whose presence can be detected, can be administered. For example, colorectal cancer antigen polypeptides labeled with a radio-opaque or other appropriate compound can be administered and visualized in vivo, as discussed, above for labeled antibodies. Further such colorectal cancer antigen polypeptides can be utilized for in vitro diagnostic procedures.

[0416] A colorectal cancer antigen polypeptide-specific antibody or antibody fragment which has been labeled with an appropriate detectable imaging moiety, such as a radioisotope (for example, ¹³¹I, ¹¹²In, ^{99m}Tc), a radio-opaque substance, or a material detectable by nuclear magnetic resonance, is introduced (for example, parenterally, subcutaneously or intraperitoneally) into the mammal to be examined for a colorectal disorder. It will be understood in the art that the size of the subject and the imaging system used will determine the quantity of imaging moiety needed to produce diagnostic images. In the case of a radioisotope moiety, for a human subject, the quantity of radioactivity injected will normally range from about 5 to 20 millicuries of ^{99m}Tc. The labeled antibody or antibody fragment will then preferentially accumulate at the location of cells which contain colorectal cancer antigen protein. In vivo tumor imaging is described in S.W. Burchiel et al., “Immunopharmacokinetics of Radiolabeled Antibodies and Their Fragments” (Chapter 13 in Tumor Imaging: The Radiochemical Detection of Cancer, S. W. Burchiel and B. A. Rhodes, eds., Masson Publishing Inc. (1982)).

[0417] With respect to antibodies, one of the ways in which the anti-colorectal cancer antigen antibody can be detectably labeled is by linking the same to an enzyme and using the linked product in an enzyme immunoassay (EIA) (Voller, A., “The Enzyme Linked Immunosorbent Assay (ELISA)”, 1978, Diagnostic Horizons 2:1-7, Microbiological Associates Quarterly Publication, Walkersville, Md.); Voller et al., J. Clin. Pathol. 31:507-520 (1978); Butler, J. E., Meth. Enzymol. 73:482-523 (1981); Maggio, E. (ed.), 1980, Enzyme Immunoassay, CRC Press, Boca Raton, Fla.; Ishikawa, E. et al., (eds.), 1981, Enzyme Immunoassay, Kgaku Shoin, Tokyo). The enzyme, which is bound to the antibody will react with an appropriate substrate, preferably a chromogenic substrate, in such a manner as to produce a chemical moiety which can be detected, for example, by spectrophotometric, fluorimetric or by visual means. Enzymes which can be used to detectably label the antibody include, but are not limited to, malate dehydrogenase, staphylococcal nuclease, delta-5-steroid isomerase, yeast alcohol dehydrogenase, alpha-glycerophosphate, dehydrogenase, triose phosphate isomerase, horseradish peroxidase, alkaline phosphatase, asparaginase, glucose oxidase, beta-galactosidase, ribonuclease, urease, catalase, glucose-6-phosphate dehydrogenase, glucoamylase and acetylcholinesterase. Additionally, the detection can be accomplished by colorimetric methods which employ a chromogenic substrate for the enzyme. Detection may also be accomplished by visual comparison of the extent of enzymatic reaction of a substrate in comparison with similarly prepared standards.

[0418] Detection may also be accomplished using any of a variety of other immunoassays. For example, by radioactively labeling the antibodies or antibody fragments, it is possible to detect colorectal cancer antigens through the use of a radioimmunoassay (RIA) (see, for example, Weintraub, B., Principles of Radioimmunoassays, Seventh Training Course on Radioligand Assay Techniques, The Endocrine Society, March, 1986, which is incorporated by reference herein). The radioactive isotope can be detected by means including, but not limited to, a gamma counter, a scintillation counter, or autoradiography.

[0419] It is also possible to label the antibody with a fluorescent compound. When the fluorescently labeled antibody is exposed to light of the proper wave length, its presence can then be detected due to fluorescence. Among the most commonly used fluorescent labeling compounds are fluorescein isothiocyanate, rhodamine, phycoerythrin, phycocyanin, allophycocyanin, ophthaldehyde and fluorescamine.

[0420] The antibody can also be detectably labeled using fluorescence emitting metals such as ¹⁵²Eu, or others of the lanthanide series. These metals can be attached to the antibody using such metal chelating groups as diethylenetriaminepentacetic acid (DTPA) or ethylenediaminetetraacetic acid (EDTA).

[0421] The antibody also can be detectably labeled by coupling it to a chemiluminescent compound. The presence of the chemiluminescent-tagged antibody is then determined by detecting the presence of luminescence that arises during the course of a chemical reaction. Examples of particularly useful chemiluminescent labeling compounds are luminol, isoluminol, theromatic acridinium ester, imidazole, acridinium salt and oxalate ester.

[0422] Likewise, a bioluminescent compound may be used to label the antibody of the present invention. Bioluminescence is a type of chemiluminescence found in biological systems in, which a catalytic protein increases the efficiency of the chemiluminescent reaction. The presence of a bioluminescent protein is determined by detecting the presence of luminescence. Important bioluminescent compounds for purposes of labeling are luciferin, luciferase and aequorin.

[0423] Methods for Detecting Colorectal Disease, Including Cancer

[0424] In general, a colorectal disease or cancer may be detected in a patient based on the presence of one or more colorectal cancer antigen proteins of the invention and/or polynucleotides encoding such proteins in a biological sample (for example, blood, sera, urine, and/or tumor biopsies) obtained from the patient. In other words, such proteins and/or polynucleotides may be used as markers to indicate the presence or absence of a colorectal disease or disorder, including cancer. Cancers that may be diagnosed, and/or prognosed using the compositions of the invention include but are not limited to, colorectal cancer. In addition, such proteins and/or polynucleotides may be useful for the detection of other diseases and cancers, including cancers of tissues/cells corresponding to the library source disclosed in column 7 of Table 1A expressing the corresponding colorectal cancer sequence disclosed in the same row of Table 1A. The binding agents provided herein generally permit detection of the level of antigen that binds to the agent in the biological sample. Polynucleotide primers and probes may be used to detect the level of mRNA encoding colorectal cancer antigen polypeptides, which is also indicative of the presence or absence of a colorectal disease or disorder, including cancer. In general, colorectal cancer antigen polypeptides should be present at a level that is at least three fold higher in diseased tissue than in normal tissue.

[0425] There are a variety of assay formats known to those of ordinary skill in the art for using a binding agent to detect polypeptide markers in a sample. See, e.g., Harlow and Lane, supra. In general, the presence or absence of a colorectal disease in a patient may be determined by (a) contacting a biological sample obtained from a patient with a binding agent; (b) detecting in the sample a level of polypeptide that binds to the binding agent; and (c) comparing the level of polypeptide with a predetermined cut-off value.

[0426] In a preferred embodiment, the assay involves the use of binding agent immobilized on a solid support to bind to and remove the colorectal cancer antigen polypeptide of the invention from the remainder of the sample. The bound polypeptide may then be detected using a detection reagent that contains a reporter group and specifically binds to the binding agent/polypeptide complex. Such detection reagents may comprise, for example, a binding agent that specifically binds to the polypeptide or an antibody or other agent that specifically binds to the binding agent, such as an anti-immunoglobulin, protein G, protein A or a lectin. Alternatively, a competitive assay may be utilized, in which a polypeptide is labeled with a reporter group and allowed to bind to the immobilized binding agent after incubation of the binding agent with the sample. The extent to which components of the sample inhibit the binding of the labeled polypeptide to the binding agent is indicative of the reactivity of the sample with the immobilized binding agent. Suitable polypeptides for use within such assays include colorectal cancer antigen polypeptides and portions thereof, or antibodies, to which the binding agent binds, as described above.

[0427] The solid support may be any material known to those of skill in the art to which colorectal cancer antigen polypeptides of the invention may be attached. For example, the solid support may be a test well in a microtiter plate or a nitrocellulose or other suitable membrane. Alternatively, the support may be a bead or disc, such as glass fiberglass, latex or a plastic material such as polystyrene or polyvinylchloride. The support may also be a magnetic particle or a fiber optic sensor, such as those disclosed, for example, in U.S. Pat. No. 5,359,681. The binding agent may be immobilized on the solid support using a variety of techniques known to those of skill in the art, which are amply described in the patent and scientific literature. In the context of the present invention, the term “immobilization” refers to both noncovalent association, such as adsorption, and covalent attachment (which may be a direct linkage between the agent and functional groups on the support or may be a linkage by way of a cross-linking agent). Immobilization by adsorption to a well in a microtiter plate or to a membrane is preferred. In such cases, adsorption may be achieved by contacting the binding agent, in a suitable buffer, with the solid support for the suitable amount of time. The contact time varies with temperature, but is typically between about 1 hour and about 1 day. In general, contacting a well of plastic microtiter plate (such as polystyrene or polyvinylchloride) with an amount of binding agent ranging from about 10 ng to about 10 ug, and preferably about 100 ng to about 1 ug, is sufficient to immobilize an adequate amount of binding agent.

[0428] Covalent attachment of binding agent to a solid support may generally be achieved by first reacting the support with a bifunctional reagent that will react with both the support and a functional group; such as a hydroxyl or amino group, on the binding agent. For example, the binding agent may be covalently attached to supports having an appropriate polymer coating using benzoquinone or by condensation of an aldehyde group on the support with an amine and an active hydrogen on the binding partner (see, e.g., Pierce Immunotechnology Catalog and Handbook, 1991, at A12-A13).

[0429] Gene Therapy Methods

[0430] Also encompassed by the present invention are gene therapy methods for treating or preventing disorders, diseases and conditions. The gene therapy methods relate to the introduction of nucleic acid (DNA, RNA and antisense DNA or RNA) sequences into an animal to achieve expression of a colorectal cancer antigen of the present invention. This method requires a polynucleotide which codes for a polypeptide of the present invention operatively linked to a promoter and any other genetic elements necessary for the expression of the polypeptide by the target tissue. Such gene therapy and delivery techniques are known in the art, see, for example, WO90/11092, which is herein incorporated by reference.

[0431] Thus, for example, cells from a patient may be engineered with a polynucleotide (DNA or RNA) comprising a promoter operably linked to a polynucleotide of the present invention ex vivo, with the engineered cells then being provided to a patient to be treated with the polypeptide of the present invention. Such methods are well-known in the art. For example, see Belldegrun, A., et al., J. Natl. Cancer Inst. 85: 207-216 (1993); Ferrantini, M. et al., Cancer Research 53: 1107-1112 (1993); Ferrantini, M. et al., J. Immunology 153: 4604-4615 (1994); Kaido, T., et al., Int. J. Cancer 60: 221-229 (1995); Ogura, H., et al., Cancer Research 50: 5102-5106 (1990); Santodonato, L., et al., Human Gene Therapy 7:1-10 (1996); Santodonato, L., et al., Gene Therapy 4:1246-1255 (1997); and Zhang, J. -F. et al., Cancer Gene Therapy 3: 31-38 (1996)), which are herein incorporated by reference. In one embodiment, the cells, which are engineered are arterial cells. The arterial cells may be reintroduced into the patient through direct injection to the artery, the tissues surrounding the artery, or through catheter injection.

[0432] As discussed in more detail below, the polynucleotide constructs can be delivered by any method that delivers injectable materials to the cells of an animal, such as, injection into the interstitial space of tissues (heart, muscle, skin, lung, liver, and the like). The polynucleotide constructs may be delivered in a pharmaceutically acceptable liquid or aqueous carrier.

[0433] In one embodiment, the polynucleotide of the present invention is delivered as a naked polynucleotide. The term “naked” polynucleotide, DNA or RNA refers to sequences that are free from any delivery vehicle that acts to assist, promote or facilitate entry into the cell, including viral sequences, viral particles, liposome formulations, lipofectin or precipitating agents and the like. However, the polynucleotide of the present invention can also be delivered in liposome formulations and lipofectin formulations and the like can be prepared by methods well known to those skilled in the art. Such methods are described, for example, in U.S. Pat. Nos. 5,593,972, 5,589,466, and 5,580,859, which are herein incorporated by reference.

[0434] The polynucleotide vector constructs used in the gene therapy method are preferably constructs that will not integrate into the host genome nor will they contain sequences that allow for replication. Appropriate vectors include pWLNEO, pSV2CAT, pOG44, pXT1 and pSG available from Stratagene; pSVK3, pBPV, pMSG and pSVL available from Pharmacia; and pEF1/V5, pcDNA3.1, and pRc/CMV2 available from Invitrogen. Other suitable vectors will be readily apparent to the skilled artisan.

[0435] Any strong promoter known to those skilled in the art can be used for driving the expression of the polynucleotide sequence. Suitable promoters include adenoviral promoters, such as the adenoviral major late promoter; or heterologous promoters, such as the cytomegalovirus (CMV) promoter; the respiratory syncytial virus (RSV) promoter; inducible promoters, such as the MMT promoter, the metallothionein promoter; heat shock promoters; the albumin promoter; the ApoAI promoter; human globin promoters; viral thymidine kinase promoters, such as the Herpes Simplex thymidine kinase promoter; retroviral LTRs; the b-actin promoter; and human growth hormone promoters. The promoter also may be the native promoter for the polynucleotide of the present invention.

[0436] Unlike other gene therapy techniques, one major advantage of introducing naked nucleic acid sequences into target cells is the transitory nature of the polynucleotide synthesis in the cells. Studies have shown that non-replicating DNA sequences can be introduced into cells to provide production of the desired polypeptide for periods of up to six months.

[0437] The polynucleotide construct can be delivered to the interstitial space of tissues within the an animal, including of muscle, skin, brain, lung, liver, spleen, bone marrow, thymus, heart, lymph, blood, bone, cartilage, pancreas, kidney, gall bladder, stomach, intestine, testis, ovary, uterus, rectum, nervous system, eye, gland, and connective tissue. Interstitial space of the tissues comprises the intercellular, fluid, mucopolysaccharide matrix among the reticular fibers of organ tissues, elastic fibers in the walls of vessels or chambers, collagen fibers of fibrous tissues, or that same matrix within connective tissue ensheathing muscle cells or in the lacunae of bone. It is similarly the space occupied by the plasma of the circulation and the lymph fluid of the lymphatic channels. Delivery to the interstitial space of muscle tissue is preferred for the reasons discussed below. They may be conveniently delivered by injection into the tissues comprising these cells. They are preferably delivered to and expressed in persistent, non-dividing cells which are differentiated, although delivery and expression may be achieved in non-differentiated or less completely differentiated cells, such as, for example, stem cells of blood or skin fibroblasts. In vivo muscle cells are particularly competent in their ability to take up and express polynucleotides.

[0438] For the naked nucleic acid sequence injection, an effective dosage amount of DNA or RNA will be in the range of from about 0.05 mg/kg body weight to about 50 mg/kg body weight. Preferably the dosage will be from about 0.005 mg/kg to about 20 mg/kg and more preferably from about 0.05 mg/kg to about 5 mg/kg. Of course, as the artisan of ordinary skill will appreciate, this dosage will vary according to the tissue site of injection. The appropriate and effective dosage of nucleic acid sequence can readily be determined by those of ordinary skill in the art and may depend on the condition being treated and the route of administration.

[0439] The preferred route of administration is by the parenteral route of injection into the interstitial space of tissues. However, other parenteral routes may also be used, such as, inhalation of an aerosol formulation particularly for delivery to lungs or bronchial tissues, throat or mucous membranes of the nose. In addition, naked DNA constructs can be delivered to arteries during angioplasty by the catheter used in the procedure.

[0440] The naked polynucleotides are delivered by any method known in the art, including, but not limited to, direct needle injection at the delivery site, intravenous injection, topical administration, catheter infusion, and so-called “gene guns”. These delivery methods are known in the art.

[0441] The constructs may also be delivered with delivery vehicles such as viral sequences, viral particles, liposome formulations, lipofectin, precipitating agents, etc. Such methods of delivery are known in the art.

[0442] In certain embodiments, the polynucleotide constructs are complexed in a liposome preparation. Liposomal preparations for use in the instant invention include cationic (positively charged), anionic (negatively charged) and neutral preparations. However, cationic liposomes are particularly preferred because a tight charge complex can be formed between the cationic liposome and the polyanionic nucleic acid. Cationic liposomes have been shown to mediate intracellular delivery of plasmid DNA (Feigner et al., Proc. Natl. Acad. Sci. USA (1987) 84:7413-7416, which is herein incorporated by reference); mRNA (Malone et al., Proc. Natl. Acad. Sci. USA (1989) 86:6077-6081, which is herein incorporated by reference); and purified transcription factors (Debs et al., J. Biol. Chem. (1990) 265:10189-10192, which is herein incorporated by reference), in functional form.

[0443] Cationic liposomes are readily available. For example, N[1-2,3-dioleyloxy)propyl]-N,N,N-triethylammonium (DOTMA) liposomes are particularly useful and are available under the trademark Lipofectin, from GIBCO BRL, Grand Island, N.Y., (see, also, Felgner et al., Proc. Natl Acad. Sci. USA (1987) 84:7413-7416, which is herein incorporated by reference). Other commercially available liposomes include transfectace (DDAB/DOPE) and DOTAP/DOPE (Boehringer).

[0444] Other cationic liposomes can be prepared from readily available materials using techniques well known in the art. See, e.g. PCT Publication No. WO 90/11092 (which is herein incorporated by reference) for a description of the synthesis of DOTAP (1,2-bis(oleoyloxy)-3-(trimethylammonio)propane) liposomes. Preparation of DOTMA liposomes is explained in the literature, see, e.g., P. Felgner et al., Proc. Natl. Acad. Sci. USA 84:7413-7417, which is herein incorporated by reference. Similar methods can be used to prepare liposomes from other cationic lipid materials.

[0445] Similarly, anionic and neutral liposomes are readily available, such as from Avanti Polar Lipids (Birmingham, Ala.), or can be easily prepared using readily available materials. Such materials include phosphatidyl choline, cholesterol, phosphatidyl ethanolamine, dioleoylphosphatidyl choline (DOPC), dioleoylphosphatidyl glycerol (DOPG), dioleoylphoshatidyl ethanolamine (DOPE), among others. These materials can also be mixed with the DOTMA and DOTAP starting materials in appropriate ratios. Methods for making liposomes using these materials are well known in the art.

[0446] For example, commercially dioleoylphosphatidyl choline (DOPC), dioleoylphosphatidyl glycerol (DOPG), and dioleoylphosphatidyl ethanolamine (DOPE) can be used in various combinations to make conventional liposomes, with or without the addition of cholesterol. Thus, for example, DOPG/DOPC vesicles can be prepared by drying 50 mg each of DOPG and DOPC under a stream of nitrogen gas into a sonication vial. The sample is placed under a vacuum pump overnight and is hydrated the following day with deionized water. The sample is then sonicated for 2 hours in a capped vial, using a Heat Systems model 350 sonicator equipped with an inverted cup (bath type) probe at the maximum setting while the bath is circulated at 15EC. Alternatively, negatively charged vesicles can be prepared without sonication to produce multilamellar vesicles or by extrusion through nucleopore membranes to produce unilamellar vesicles of discrete size. Other methods are known and available to those of skill in the art.

[0447] The liposomes can comprise multilamellar vesicles (MLVs), small unilamellar vesicles (SUVs), or large unilamellar vesicles (LUVs), with SUVs being preferred. The various liposome-nucleic acid complexes are prepared using methods well known in the art. See, e.g., Straubinger et al., Methods of Immunology (1983), 101:512-527, which is herein incorporated by reference. For example, MLVs containing nucleic acid can be prepared by depositing a thin film of phospholipid on the walls of a glass tube and subsequently hydrating with a solution of the material to be encapsulated. SUVs are prepared by extended sonication of MLVs to produce a homogeneous population of unilamellar liposomes. The material to be entrapped is added to a suspension of preformed MLVs and then sonicated. When using liposomes containing cationic lipids, the dried lipid film is resuspended in an appropriate solution such as sterile water or an isotonic buffer solution such as 10 mM Tris/NaCl, sonicated, and then the preformed liposomes are mixed directly with the DNA. The liposome and DNA form a very stable complex due to binding of the positively charged liposomes to the cationic DNA. SUVs find use with small nucleic acid fragments. LUVs are prepared by a number of methods, well known in the art. Commonly used methods include Ca²⁺-EDTA chelation (Papahadjopoulos et al., Biochim. Biophys. Acta (1975) 394:483; Wilson et al., Cell 17:77 (1979); ether injection (Deamer, D. and Bangham, A., Biochim. Biophys. Acta 443:629 (1976); Ostro et al., Biochem. Biophys. Res. Commun. 76:836 (1977); Fraley et al., Proc. Natl. Acad. Sci. USA 76:3348 (1979)); detergent dialysis (Enoch, H. and Strittmatter, P., Proc. Natl. Acad. Sci. USA 76:145 (1979)); and reverse-phase evaporation (REV) (Fraley et al., J. Biol. Chem. 255:10431 (1980); Szoka et al., Proc. Natl. Acad. Sci. USA 75:145 (1978); Schaefer-Ridder et al., Science 215:166 (1982)), which are herein incorporated by reference.

[0448] Generally, the ratio of DNA to liposomes will be from about 10:1 to about 1:10. Preferably, the ration will be from about 5:1 to about 1:5. More preferably, the ration will be about 3:1 to about 1:3. Still more preferably, the ratio will be about 1:1.

[0449] U.S. Pat. No. 5,676,954 (which is herein incorporated by reference) reports on the injection of genetic material, complexed with cationic liposomes carriers, into mice. U.S. Pat. Nos. 4,897,355, 4,946,787, 5,049,386, 5,459,127, 5,589,466, 5,693,622, 5,580,859, 5,703,055, and international publication no. WO 94/9469 (which are herein incorporated by reference) provide cationic lipids for use in transfecting DNA into cells and mammals. U.S. Pat. Nos. 5,589,466, 5,693,622, 5,580,859, 5,703,055, and International Publication No. WO 94/9469 provide methods for delivering DNA-cationic lipid complexes to mammals.

[0450] In certain embodiments, cells are engineered, ex vivo or in vivo, using a retroviral particle containing RNA, which comprises a sequence encoding a polypeptide of the present invention. Retroviruses from which the retroviral plasmid vectors may be derived include, but are not limited to, Moloney Murine Leukemia Virus, spleen necrosis virus, Rous sarcoma Virus, Harvey Sarcoma Virus, avian leukosis virus, gibbon ape leukemia virus, human immunodeficiency virus, Myeloproliferative Sarcoma Virus, and mammary tumor virus.

[0451] The retroviral plasmid vector is employed to transduce packaging cell lines to form producer cell lines. Examples of packaging cells which may be transfected include, but are not limited to, the PE501, PA317, R-2, R-AM, PA12, T19-14X, VT-19-17-H2, RCRE, RCRIP, GP+E-86, GP+envAm12, and DAN cell lines as described in Miller, Human Gene Therapy 1:5-14 (1990), which is incorporated herein by reference in its entirety. The vector may transduce the packaging cells through any means known in the art. Such means include, but are not limited to, electroporation, the use of liposomes, and CaPO₄ precipitation. In one alternative, the retroviral plasmid vector may be encapsulated into a liposome, or coupled to a lipid, and then administered to a host.

[0452] The producer cell line generates infectious retroviral vector particles, which include polynucleotide encoding a polypeptide of the present invention. Such retroviral vector particles then may be employed, to transduce eukaryotic cells, either in vitro or in vivo. The transduced eukaryotic cells will express a polypeptide of the present invention.

[0453] In certain other embodiments, cells are engineered, ex vivo or in vivo, with .polynucleotide contained in an adenovirus vector. Adenovirus can be manipulated such that it encodes and expresses a polypeptide of the present invention, and at the same time is inactivated in tenns of its ability to replicate in a normal lytic viral life cycle. Adenovirus expression is achieved without integration of the viral DNA into the host cell chromosome, thereby alleviating concerns about insertional mutagenesis. Furthermore, adenoviruses have been used as live enteric vaccines for many years with an excellent safety profile (Schwartz, et al., Am. Rev. Respir. Dis.109:233-238 (1974)). Finally, adenovirus mediated gene transfer has been demonstrated in a number of instances including transfer of alpha-1-antitrypsin and CFTR to the lungs of cotton rats (Rosenfeld et al., Science 252:431-434 (1991); Rosenfeld et al., Cell 68:143-155 (1991)). Furthermore, extensive studies to attempt to establish adenovirus as a causative agent in human cancer were uniformly negative (Green et al., Proc. Natl. Acad. Sci. USA 76:6606 (1979)).

[0454] Suitable adenoviral vectors useful in the present invention are described, for example, in Kozarsky and Wilson, Curr. Opin. Genet. Devel. 3:499-503 (1993); Rosenfeld et al., Cell 68:143-155 (1992); Engelhardt et al., Human Genet. Ther. 4:759-769 (1993); Yang et al., Nature Genet. 7:362-369 (1994); Wilson et al., Nature 365:691-692 (1993); and U.S. Pat. No. 5,652,224, which are herein incorporated by reference. For example, the adenovirus vector Ad2 is useful and can be grown in human 293 cells. These cells contain the E1 region of adenovirus and constitutively express E1a and E1b, which complement the defective adenoviruses by providing the products of the genes deleted from the vector. In addition to Ad2, other varieties of adenovirus (e.g., Ad3, Ad5, and Ad7) are also useful in the present invention.

[0455] Preferably, the adenoviruses used in the present invention are replication deficient. Replication deficient adenoviruses require the aid of a helper virus and/or packaging cell line to form infectious particles. The resulting virus is capable of infecting cells and can express a polynucleotide of interest which is operably linked to a promoter, but cannot replicate in most cells. Replication deficient adenoviruses may be deleted in one or more of all or a portion of the following genes: E1a, E1b, E3, E4, E2a, or L1 through L5.

[0456] In certain other embodiments, the cells are engineered, ex vivo or in vivo, using an adeno-associated virus (AAV). AAVs are naturally occurring defective viruses that require helper viruses to produce infectious particles (Muzyczka, N., Curr. Topics in Microbiol. Immunol. 158:97 (1992)). It is also one of the few viruses that may integrate its DNA into non-dividing cells. Vectors containing as little as 300 base pairs of AAV can be packaged and can integrate, but space for exogenous DNA is limited to about 4.5 kb. Methods for producing and using such AAVs are known in the art. See, for example, U.S. Pat. Nos. 5,139,941, 5,173,414, 5,354,678, 5,436,146, 5,474,935, 5,478,745, and 5,589,377.

[0457] For example, an appropriate AAV vector for use in the present invention will include all the sequences necessary for DNA replication, encapsidation, and host-cell integration. The polynucleotide construct is inserted into the AAV vector using standard cloning methods, such as those found in Sambrook et al., Molecular Cloning: A Laboratory Manual, Cold Spring Harbor Press (1989). The recombinant AAV vector is then transfected into packaging cells which are infected with a helper virus, using any standard technique, including lipofection, electroporation, calcium phosphate precipitation, etc. Appropriate helper viruses include adenoviruses, cytomegaloviruses, vaccinia viruses, or herpes viruses. Once the packaging cells are transfected and infected, they will produce infectious AAV viral particles, which contain the polynucleotide construct. These viral particles are then used to transduce eukaryotic cells, either ex vivo or in vivo. The transduced cells will contain the polynucleotide construct integrated into its genome, and will express a polypeptide of the invention.

[0458] Another method of gene therapy involves operably associating heterologous control regions and endogenous colorectal cancer antigen polynucleotide sequences (e.g., encoding a colorectal cancer antigen polypeptide of the present invention) via homologous recombination (see, e.g., U.S. Pat. No. 5,641,670, issued Jun. 24, 1997; International Publication No. WO 96/29411, published Sep. 26, 1996; International Publication No. WO 94/12650, published Aug. 4, 1994; Koller et al., Proc. Natl. Acad. Sci. USA 86:8932-8935 (1989); and Zijlstra et al., Nature 342:435-438 (1989), which are herein incorporated by reference. This method involves the activation of a gene which is present in the target cells, but which is not normally expressed in the cells, or is expressed at a lower level than desired.

[0459] Polynucleotide constructs are made, using standard techniques known in the art, which contain the promoter with targeting sequences flanking the promoter. Suitable promoters are described herein. The targeting sequence is sufficiently complementary to an endogenous sequence to permit homologous recombination of the promoter-targeting sequence with the endogenous sequence. The targeting sequence will be sufficiently near the 5′ end of the desired endogenous polynucleotide sequence so the promoter will be operably linked to the endogenous sequence upon homologous recombination.

[0460] The promoter and the targeting sequences can be amplified using PCR. Preferably, the amplified promoter contains distinct restriction enzyme sites on the 5′ and 3′ ends. Preferably, the 3′ end of the first targeting sequence contains the same restriction enzyme site as the 5′ end of the amplified promoter and the 5′ end of the second targeting sequence contains the same restriction site as the 3′ end of the amplified promoter. The amplified promoter and targeting sequences are digested and ligated together.

[0461] The promoter-targeting sequence construct is delivered to the cells, either as naked polynucleotide, or in conjunction with transfection-facilitating agents, such as liposomes, viral sequences, viral particles, whole viruses, lipofection, precipitating agents, etc., described in more detail above. The P promoter-targeting sequence can be delivered by any method, included direct needle injection, intravenous injection, topical administration, catheter infusion, particle accelerators, etc. The methods are described in more detail below.

[0462] The promoter-targeting sequence construct is taken up by cells. Homologous recombination between the construct and the endogenous sequence takes place, such that an endogenous sequence is placed under the control of the promoter. The promoter then drives the expression of the endogenous sequence.

[0463] The polynucleotide encoding a polypeptide of the present invention may contain a secretory signal sequence that facilitates secretion of the protein. Typically, the signal sequence is positioned in the coding region of the polynucleotide to be expressed towards or at the 5′ end of the coding region. The signal sequence may be homologous or heterologous to the colorectal cancer antigen polynucleotide of interest and may be homologous or heterologous to the cells to be transfected. Additionally, the signal sequence may be chemically synthesized using methods known in the art.

[0464] Any mode of administration of any of the above-described polynucleotides constructs can be used so long as the mode results in the expression of one or more molecules in an amount sufficient to provide a therapeutic effect. This includes direct needle injection, systemic injection, catheter infusion, biolistic injectors, particle accelerators (i.e., “gene guns”), gelfoam sponge depots, other commercially available depot materials, osmotic pumps (e.g., Alza minipumps), oral or suppositorial solid (tablet or pill) pharmaceutical formulations, and decanting or topical applications during surgery. For example, direct injection of naked calcium phosphate-precipitated plasmid into rat liver and rat spleen or a protein-coated plasmid into the portal vein has resulted in gene expression of the foreign gene in the rat livers (Kaneda et al., Science 243-375 (1989)).

[0465] A preferred method of local administration is by direct injection. Preferably, a recombinant molecule of the present invention complexed with a delivery vehicle is administered by direct injection into or locally within the area of arteries. Administration of a composition locally within the area of arteries refers to injecting the composition centimeters and preferably, millimeters within arteries.

[0466] Another method of local administration is to contact a polynucleotide construct of the present invention in or around a surgical wound. For example, a patient can undergo surgery and the polynucleotide construct can be coated on the surface of tissue inside the wound or the construct can be injected into areas of tissue inside the wound.

[0467] Therapeutic compositions useful in systemic administration, include recombinant molecules of the present invention complexed to a targeted delivery vehicle of the present invention. Suitable delivery vehicles for use with systemic administration comprise liposomes comprising ligands for targeting the vehicle to a particular site. In specific embodiments, suitable delivery vehicles for use with systemic administration comprise liposomes comprising polypeptides of the invention for targeting the vehicle to a particular site.

[0468] Preferred methods of systemic administration, include intravenous injection, aerosol, oral and percutaneous (topical) delivery. Intravenous injections can be performed using methods standard in the art. Aerosol delivery can also be performed using methods standard in the art (see, for example, Stribling et al., Proc. Natl. Acad. Sci. USA 189:11277-11281, 1992, which is incorporated herein by reference). Oral delivery can be performed by complexing a polynucleotide construct of the present invention to a carrier capable of withstanding degradation by digestive enzymes in the gut of an animal. Examples of such carriers, include plastic capsules or tablets, such as those known in the art. Topical delivery can be performed by mixing a polynucleotide construct of the present invention with a lipophilic reagent (e.g., DMSO) that is capable of passing into the skin.

[0469] Determining an effective amount of substance to be delivered can depend upon a number of factors including, for example, the chemical structure and biological activity of the substance, the age and weight of the animal, the precise condition requiring treatment and its severity, and the route of administration. The frequency of treatments depends upon a number of factors, such as the amount of polynucleotide constructs administered per dose, as well as the health and history of the subject. The precise amount, number of doses, and timing of doses will be determined by the attending physician or veterinarian.

[0470] Therapeutic compositions of the present invention can be administered to any animal, preferably to mammals and birds. Preferred mammals include humans, dogs, cats, mice, rats, rabbits sheep, cattle, horses and pigs, with humans being particularly preferred.

[0471] Biological Activities

[0472] Polynucleotides or polypeptides, or agonists or antagonists of the present invention, can be used in assays to test for one or more biological activities. If these polynucleotides or polypeptides, or agonists or antagonists of the present invention, do exhibit activity in a particular assay, it is likely that these molecules may be involved in the diseases associated with the biological activity. Thus, the polynucleotides and polypeptides, and agonists or antagonists could be used to treat, prevent diagnose and/or prognose the associated disease.

[0473] The colorectal cancer antigen polynucleotides and polypeptides of the invention are predicted to have predominant expression in colorectal tissues.

[0474] Thus, the colorectal cancer antigens of the invention may be useful as therapeutic molecules. Each would be useful for diagnosis, detection, treatment and/or prevention of diseases or disorders of the colon and rectum, including but not limited to colon cancer, adenomatous colon polyps (e.g., villous adenoma), colon carcinoma, colorectal cancer, and/or as described under “Gastrointestinal Disorders” below.

[0475] In a preferred embodiment, polynucleotides of the invention (e.g., a nucleic acid sequence of SEQ ID NO:X or the complement thereof, or the cDNA sequence contained in Clone ID NO:Z, or fragments or variants thereof) and/or polypeptides of the invention (e.g., an amino acid sequence contained in SEQ ID NO:Y, an amino acid sequence encoded by SEQ ID NO:X, or the complement threof, an amino acid sequence encoded by the cDNA sequence contained in Clone ID NO:Z and fragments or variants thereof as described herein) are useful for the diagnosis, detection, treatement, and/or prevention of diseases or disorders of the tissues/cells corresponding to the library source disclosed in column 7 of Table 1A expressing the corresponding colorectal cancer sequence disclosed in the same row of Table 1A. In certain embodiments, a polypeptide of the invention, or polynucleotides, antibodies, agonists, or antagonists corresponding to that polypeptide, may be used to diagnose and/or prognose diseases and/or disorders associated with the tissue(s) in which the polypeptide of the invention is expressed, including one, two, three, four, five, or more tissues disclosed in Table 1A, column 7 (Tissue Distribution Library Code).

[0476] Particularly, the colorectal cancer antigens may be a useful therapeutic for colorectal cancer. Treatment, diagnosis, detection, and/or prevention of colorectal disorders could be carried out using a colorectal cancer antigen or soluble form of a colorectal cancer antigen, a colorectal cancer antigen ligand, gene therapy, or ex vivo applications. Moreover, inhibitors of a colorectal cancer antigen, either blocking antibodies or mutant forms, could modulate the expression of the colorectal cancer antigen. These inhibitors may be useful to treat, diagnose, detect, and/or prevent diseases associated with the misregulation of a colorectal cancer antigen.

[0477] In one embodiment, the invention provides a method for the specific delivery of compositions of the invention to cells (e.g., normal or diseased colorectal cells) by administering polypeptides of the invention (e.g., colorectal cancer antigen polypeptides or anti-colorectal cancer antigen antibodies) that are associated with heterologous polypeptides or nucleic acids. In one example, the invention provides a method for delivering a therapeutic protein into the targeted cell (e.g., an aberrant colorectal cell or colorectal cancer cell). In another example, the invention provides a method for delivering a single stranded nucleic acid (e.g., antisense or ribozymes) or double stranded nucleic acid (e.g., DNA that can integrate into the cell's genome or replicate episomally and that can be transcribed) into the targeted cell.

[0478] In another embodiment, the invention provides a method for the specific destruction of cells (e.g., the destruction of aberrant colorectal cells, including, but not limited to, colorectal tumor cells) by administering polypeptides of the invention (e.g., colorectal cancer antigen polypeptides or fragments thereof, or anti-colorectal cancer antigen antibodies) in association with toxins or cytotoxic prodrugs.

[0479] By “toxin” is meant compounds that bind and activate endogenous cytotoxic effector systems, radioisotopes, holotoxins, modified toxins, catalytic subunits of toxins, cytotoxins (cytotoxic agents), or any molecules or enzymes not normally present in or on the surface of a cell that under defined conditions cause the cell's death. Toxins that may be used according to the methods of the invention include, but are not limited to, radioisotopes known in the art, compounds such as, for example, antibodies (or complement fixing containing portions thereof) that bind an inherent or induced endogenous cytotoxic effector system, thymidine kinase, endonuclease, RNAse, alpha toxin, ricin, abrin, Pseudomonas exotoxin A, diphtheria toxin, saporin, momordin, gelonin, pokeweed antiviral protein, alpha-sarcin and cholera toxin. “Toxin” also includes a cytostatic or cytocidal agent, a therapeutic agent or a radioactive metal ion, e.g., alpha-emitters such as, for example, ²¹³Bi, or other radioisotopes such as, for example, ¹⁰³Pd, ¹³³Xe, ¹³¹I, ⁶⁸Ge, ⁵⁷Co, ⁶⁵Zn, ⁸⁵Sr, ³²P, ³⁵S, ⁹⁰Y, ¹⁵³Sm, ¹⁵³Gd, ¹⁶⁹Yb, ⁵¹Cr, ⁵⁴Mn, ⁷⁵Se, ¹¹³Sn, ⁹⁰Yttrium, ¹¹⁷Tin, ¹⁸⁶Rhenium, ¹⁶⁶Holmium, and ¹⁸⁸Rhenium; luminescent labels, such as luminol; and fluorescent labels, such as fluorescein and rhodamine, and biotin.

[0480] Techniques known in the art may be applied to label antibodies of the invention. Such techniques include, but are not limited to, the use of bifunctional conjugating agents (see e.g., U.S. Pat. Nos. 5,756,065; 5,714,631; 5,696,239; 5,652,361; 5,505,931; 5,489,425; 5,435,990; 5,428,139; 5,342,604; 5,274,119; 4,994,560; and 5,808,003; the contents of each of which are hereby incorporated by reference in its entirety). A cytotoxin or cytotoxic agent includes any agent that is detrimental to cells. Examples include paclitaxol, cytochalasin B, gramicidin D, ethidium bromide, emetine, mitomycin, etoposide, tenoposide, vincristine, vinblastine, colchicin, doxorubicin, daunorubicin, dihydroxy anthracin dione, mitoxantrone, mithramycin, actinomycin D, 1-dehydrotestosterone, glucocorticoids, procaine, tetracaine, lidocaine, propranolol, and puromycin and analogs or homologs thereof. Therapeutic agents include, but are not limited to, antimetabolites (e.g., methotrexate, 6-mercaptopurine, 6-thioguanine, cytarabine, 5-fluorouracil decarbazine), alkylating agents (e.g., mechlorethamine, thioepa chlorambucil, melphalan, carmustine (BSNU) and lomustine (CCNU), cyclothosphamide, busulfan, dibromomannitol, streptozotocin, mitomycin C, and cis-dichlorodiamine platinum (II) (DDP) cisplatin), anthracyclines (e.g., daunorubicin (formerly daunomycin) and doxorubicin), antibiotics (e.g., dactinomycin (formerly actinomycin), bleomycin, mithramycin, and anthramycin (AMC)), and anti-mitotic agents (e.g., vincristine and vinblastine).

[0481] By “cytotoxic prodrug” is meant a non-toxic compound that is converted by an enzyme, normally present in the cell, into a cytotoxic compound. Cytotoxic prodrugs that may be used according to the methods of the invention include, but are not limited to, glutamyl derivatives of benzoic acid mustard alkylating agent, phosphate derivatives of etoposide or mitomycin C, cytosine arabinoside, daunorubisin, and phenoxyacetamide derivatives of doxorubicin.

[0482] It will be appreciated that conditions caused by a decrease in the standard or normal level of a colorectal cancer antigen activity in an individual, particularly disorders of the colon and/or rectum, can be treated by administration of a colorectal cancer antigen polypeptide (e.g., such as, for example, the complete colorectal cancer antigen polypeptide, the soluble form of the extracellular domain of a colorectal cancer antigen polypeptide, or cells expressing the complete protein) or agonist. Thus, the invention also provides a method of treatment of an individual in need of an increased level of colorectal cancer antigen activity comprising administering to such an individual a pharmaceutical composition comprising an amount of an isolated colorectal cancer antigen polypeptide of the invention, or agonist thereof (e.g., an agonistic anti-colorectal cancer antigen antibody), effective to increase the colorectal cancer antigen activity level in such an individual.

[0483] It will also be appreciated that conditions caused by a increase in the standard or normal level of colorectal cancer antigen activity in an individual, particularly disorders of the colon and/or rectum, can be treated by administration of colorectal cancer antigen polypeptides (e.g., such as, for example, the complete colorectal cancer antigen polypeptide, the soluble form of the extracellular domain of a colorectal cancer antigen polypeptide, or cells expressing the complete protein) or antagonist (e.g., an antagonistic colorectal cancer antigen antibody). Thus, the invention also provides a method of treatment of an individual in need of an decreased level of colorectal cancer antigen activity comprising administering to such an individual a pharmaceutical composition comprising an amount of an isolated colorectal cancer antigen polypeptide of the invention, or antagonist thereof (e.g., an antagonistic anti-colorectal cancer antigen antibody), effective to decrease the colorectal cancer antigen activity level in such an individual.

[0484] More generally, polynucleotides, translation products and antibodies corresponding to this gene may be useful for the diagnosis, prognosis, prevention, and/or treatment of diseases and/or disorders associated with the following systems.

[0485] Gastrointestinal Disorders

[0486] Polynucleotides or polypeptides, or agonists or antagonists of the present invention, may be used to treat, prevent, diagnose, and/or prognose gastrointestinal disorders, including inflammatory diseases and/or conditions, infections, cancers (e.g., intestinal neoplasms (carcinoid tumor of the small intestine, non-Hodgkin's lymphoma of the small intestine, small bowl lymphoma)), and ulcers, such as peptic ulcers.

[0487] Gastrointestinal disorders include dysphagia, odynophagia, inflammation of the esophagus, peptic esophagitis, gastric reflux, submucosal fibrosis and stricturing, Mallory-Weiss lesions, leiomyomas, lipomas, epidermal cancers, adeoncarcinomas, gastric retention disorders, gastroenteritis, gastric atrophy, gastric/stomach cancers, polyps of the stomach, autoimmune disorders such as pernicious anemia, pyloric stenosis, gastritis (bacterial, viral, eosinophilic, stress-induced, chronic erosive, atrophic, plasma cell, and Ménétrier's), and peritoneal diseases (e.g., chyloperioneum, hemoperitoneum, mesenteric cyst, mesenteric lymphadenitis, mesenteric vascular occlusion, panniculitis, neoplasms, peritonitis, pneumoperitoneum, bubphrenic abscess).

[0488] Gastrointestinal disorders also include disorders associated with the small intestine, such as malabsorption syndromes, distension, irritable bowel syndrome, sugar intolerance, celiac disease, duodenal ulcers, duodenitis, tropical sprue, Whipple's disease, intestinal lymphangiectasia, Crohn's disease, appendicitis, obstructions of the ileum, Meckel's diverticulum, multiple diverticula, failure of complete rotation of the small and large intestine, lymphoma, and bacterial and parasitic diseases (such as Traveler's diarrhea, typhoid and paratyphoid, cholera, infection by Roundworms (Ascariasis lumbricoides), Hookworms (Ancylostoma duodenale), Threadworms (Enterobius vermicularis), Tapeworms (Taenia saginata, Echinococcus granulosus, Diphyllobothrium spp., and T. solium).

[0489] Liver diseases and/or disorders include intrahepatic cholestasis (alagille syndrome, biliary liver cirrhosis), fatty liver (alcoholic fatty liver, reye syndrome), hepatic vein thrombosis, hepatolentricular degeneration, hepatomegaly, hepatopulmonary syndrome, hepatorenal syndrome, portal hypertension (esophageal and gastric varices), liver abscess (amebic liver abscess), liver cirrhosis (alcoholic, biliary and experimental), alcoholic liver diseases (fatty liver, hepatitis, cirrhosis), parasitic (hepatic echinococcosis, fascioliasis, amebic liver abscess), jaundice (hemolytic, hepatocellular, and cholestatic), cholestasis, portal hypertension, liver enlargement, ascites, hepatitis (alcoholic hepatitis, animal hepatitis, chronic hepatitis (autoimmune, hepatitis B, hepatitis C, hepatitis D, drug induced), toxic hepatitis, viral human hepatitis (hepatitis A, hepatitis B, hepatitis C, hepatitis D, hepatitis E), Wilson's disease, granulomatous hepatitis, secondary biliary cirrhosis, hepatic encephalopathy, portal hypertension, varices, hepatic encephalopathy, primary biliary cirrhosis, primary sclerosing cholangitis, hepatocellular adenoma, hemangiomas, bile stones, liver failure (hepatic encephalopathy, acute liver failure), and liver neoplasms (angiomyolipoma, calcified liver metastases, cystic liver metastases, epithelial tumors, fibrolamellar hepatocarcinoma, focal nodular hyperplasia, hepatic adenoma, hepatobiliary cystadenoma, hepatoblastoma, hepatocellular carcinoma, hepatoma, liver cancer, liver hemangioendothelioma, mesenchymal hamartoma, mesenchymal tumors of liver, nodular regenerative hyperplasia, benign liver tumors (Hepatic cysts [Simple cysts, Polycystic liver disease, Hepatobiliary cystadenoma, Choledochal cyst], Mesenchymal tumors [Mesenchymal hamartoma, Infantile hemangioendothelioma, Hemangioma, Peliosis hepatis, Lipomas, Inflammatory pseudotumor, Miscellaneous], Epithelial tumors [Bile duct epithelium (Bile duct hamartoma, Bile duct adenoma), Hepatocyte (Adenoma, Focal nodular hyperplasia, Nodular regenerative hyperplasia)], malignant liver tumors [hepatocellular, hepatoblastoma, hepatocellular carcinoma, cholangiocellular, cholangiocarcinoma, cystadenocarcinoma, tumors of blood vessels, angiosarcoma, Karposi's sarcoma, hemangioendothelioma, other tumors, embryonal sarcoma, fibrosarcoma, leiomyosarcoma, rhabdomyosarcoma, carcinosarcoma, teratoma, carcinoid, squamous carcinoma, primary lymphoma]), peliosis hepatis, erythrohepatic porphyria, hepatic porphyria (acute intermittent porphyria, porphyria cutanea tarda), Zellweger syndrome).

[0490] Pancreatic diseases and/or disorders include acute pancreatitis, chronic pancreatitis (acute necrotizing pancreatitis, alcoholic pancreatitis), neoplasms (adenocarcinoma of the pancreas, cystadenocarcinoma, insulinoma, gastrinoma, and glucagonoma, cystic neoplasms, islet-cell tumors, pancreoblastoma), and other pancreatic diseases (e.g., cystic fibrosis, cyst (pancreatic pseudocyst, pancreatic fistula, insufficiency)).

[0491] Gallbladder diseases include gallstones (cholelithiasis and choledocholithiasis), postcholecystectomy syndrome, diverticulosis of the gallbladder, acute cholecystitis, chronic cholecystitis, bile duct tumors, and mucocele.

[0492] Diseases and/or disorders of the large intestine include antibiotic-associated colitis, diverticulitis, ulcerative colitis, acquired megacolon, abscesses, fungal and bacterial infections, anorectal disorders (e.g., fissures, hemorrhoids), colonic diseases (colitis, colonic neoplasms [colon cancer, adenomatous colon polyps (e.g., villous adenoma), colon carcinoma, colorectal cancer], colonic diverticulitis, colonic diverticulosis, megacolon [Hirschsprung disease, toxic megacolon]; sigmoid diseases [proctocolitis, sigmoin neoplasms]), constipation, Crohn's disease, diarrhea (infantile diarrhea, dysentery), duodenal diseases (duodenal neoplasms, duodenal obstruction, duodenal ulcer, duodenitis), enteritis (enterocolitis), HIV enteropathy, ileal diseases (ileal neoplasms, ileitis), immunoproliferative small intestinal disease, inflammatory bowel disease (ulcerative colitis, Crohn's disease), intestinal atresia, parasitic diseases (anisakiasis, balantidiasis, blastocystis infections, cryptosporidiosis, dientamoebiasis, amebic dysentery, giardiasis), intestinal fistula (rectal fistula), intestinal neoplasms (cecal neoplasms, colonic neoplasms, duodenal neoplasms, ileal neoplasms, intestinal polyps, jejunal neoplasms, rectal neoplasms), intestinal obstruction (afferent loop syndrome, duodenal obstruction, impacted feces, intestinal pseudo-obstruction [cecal volvulus], intussusception), intestinal perforation, intestinal polyps (colonic polyps, gardner syndrome, peutz-jeghers syndrome), jejunal diseases (jejunal neoplasms), malabsorption syndromes (blind loop syndrome, celiac disease, lactose intolerance, short bowl syndrome, tropical sprue, whipple's disease), mesenteric vascular occlusion, pneumatosis cystoides intestinalis, protein-losing enteropathies (intestinal lymphagiectasis), rectal diseases (anus diseases, fecal incontinence, hemorrhoids, proctitis, rectal fistula, rectal prolapse, rectocele), peptic ulcer (duodenal ulcer, peptic esophagitis, hemorrhage, perforation, stomach ulcer, Zollinger-Ellison syndrome), postgastrectomy syndromes (dumping syndrome), stomach diseases (e.g., achlorhydria, duodenogastric reflux (bile reflux), gastric antral vascular ectasia, gastric fistula, gastric outlet obstruction, gastritis (atrophic or hypertrophic), gastroparesis, stomach dilatation, stomach diverticulum, stomach neoplasms (gastric cancer, gastric polyps, gastric adenocarcinoma, hyperplastic gastric polyp), stomach rupture, stomach ulcer, stomach volvulus), tuberculosis, visceroptosis, vomiting (e.g., hematemesis, hyperemesis gravidarum, postoperative nausea and vomiting) and hemorrhagic colitis.

[0493] Further diseases and/or disorders of the gastrointestinal system include biliary tract diseases, such as, gastroschisis, fistula (e.g., biliary fistula, esophageal fistula, gastric fistula, intestinal fistula, pancreatic fistula), neoplasms (e.g., biliary tract neoplasms, esophageal neoplasms, such as adenocarcinoma of the esophagus, esophageal squamous cell carcinoma, gastrointestinal neoplasms, pancreatic neoplasms, such as adenocarcinoma of the pancreas, mucinous cystic neoplasm of the pancreas, pancreatic cystic neoplasms, pancreatoblastoma, and peritoneal neoplasms), esophageal disease (e.g., bullous diseases, candidiasis, glycogenic acanthosis, ulceration, barrett esophagus varices, atresia, cyst, diverticulum (e.g., Zenker's diverticulum), fistula (e.g., tracheoesophageal fistula), motility disorders (e.g., CREST syndrome, deglutition disorders, achalasia, spasm, gastroesophageal reflux), neoplasms, perforation (e.g., Boerhaave syndrome, Mallory-Weiss syndrome), stenosis, esophagitis, diaphragmatic hernia (e.g., hiatal hernia); gastrointestinal diseases, such as, gastroenteritis (e.g., cholera morbus, norwalk virus infection), hemorrhage (e.g., hematemesis, melena, peptic ulcer hemorrhage), stomach neoplasms (gastric cancer, gastric polyps, gastric adenocarcinoma, stomach cancer)), hernia (e.g., congenital diaphragmatic hernia, femoral hernia, inguinal hernia, obturator hernia, umbilical hernia, ventral hernia), and intestinal diseases (e.g., cecal diseases (appendicitis, cecal neoplasms)).

[0494] Immune Activity

[0495] Polynucleotides, polypeptides, antibodies, and/or agonists or antagonists of the present invention may be useful in treating, preventing, diagnosing and/or prognosing diseases, disorders, and/or conditions of the immune system, by, for example, activating or inhibiting the proliferation, differentiation, or mobilization (chemotaxis) of immune cells. Immune cells develop through a process called hematopoiesis, producing myeloid (platelets, red blood cells, neutrophils, and macrophages) and lymphoid (B and T lymphocytes) cells from pluripotent stem cells. The etiology of these immune diseases, disorders, and/or conditions may be genetic, somatic, such as cancer and some autoimmune diseases, acquired (e.g., by chemotherapy or toxins), or infectious. Moreover, polynucleotides, polypeptides, antibodies, and/or agonists or antagonists of the present invention can be used as a marker or detector of a particular immune system disease or disorder.

[0496] In another embodiment, a polypeptide of the invention, or polynucleotides, antibodies, agonists, or antagonists corresponding to that polypeptide, may be used to treat diseases and disorders of the immune system and/or to inhibit or enhance an immune response generated by cells associated with the tissue(s) in which the polypeptide of the invention is expressed, including one, two, three, four, five, or more tissues disclosed in Table 1A, column 7 (Tissue Distribution Library Code).

[0497] Polynucleotides, polypeptides, antibodies, and/or agonists or antagonists of the present invention may be useful in treating, preventing, diagnosing, and/or prognosing immunodeficiencies, including both congenital and acquired immunodeficiencies. Examples of B cell immunodeficiencies in which immunoglobulin levels B cell function and/or B cell numbers are decreased include: X-linked agammaglobulinemia (Bruton's disease), X-linked infantile agammaglobulinemia, X-linked immunodeficiency with hyper IgM, non X-linked immunodeficiency with hyper IgM, X-linked lymphoproliferative syndrome (XLP), agammaglobulinemia including congenital and acquired agammaglobulinemia, adult onset agammaglobulinemia, late-onset agammaglobulinemia, dysgammaglobulinemia, hypogammaglobulinemia, unspecified hypogammaglobulinemia, recessive agammaglobulinemia (Swiss type), Selective IgM deficiency, selective IgA deficiency, selective IgG subclass deficiencies, IgG subclass deficiency (with or without IgA deficiency), Ig deficiency with increased IgM, IgG and IgA deficiency with increased IgM, antibody deficiency with normal or elevated Igs, Ig heavy chain deletions, kappa chain deficiency, B cell lymphoproliferative disorder (BLPD), common variable immunodeficiency (CVID), common variable immunodeficiency (CVI) (acquired), and transient hypogammaglobulinemia of infancy.

[0498] In specific embodiments, ataxia-telangiectasia or conditions associated with ataxia-telangiectasia are treated, prevented, diagnosed, and/or prognosing using the polypeptides or polynucleotides of the invention, and/or agonists or antagonists thereof.

[0499] Examples of congenital immunodeficiencies in which T cell and/or B cell function and/or number is decreased include, but are not limited to: DiGeorge anomaly, severe combined immunodeficiencies (SCID) (including, but not limited to, X-linked SCID, autosomal recessive SCID, adenosine deaminase deficiency, purine nucleoside phosphorylase (PNP) deficiency, Class II MHC deficiency (Bare lymphocyte syndrome), Wiskott-Aldrich syndrome, and ataxia telangiectasia), thymic hypoplasia, third and fourth pharyngeal pouch syndrome, 22q11.2 deletion, chronic mucocutaneous candidiasis, natural killer cell deficiency (NK), idiopathic CD4+ T-lymphocytopenia, immunodeficiency with predominant T cell defect (unspecified), and unspecified immunodeficiency of cell mediated immunity.

[0500] In specific embodiments, DiGeorge anomaly or conditions associated with DiGeorge anomaly are treated, prevented, diagnosed, and/or prognosed using polypeptides or polynucleotides of the invention, or antagonists or agonists thereof.

[0501] Other immunodeficiencies that may be treated, prevented, diagnosed, and/or prognosed using polypeptides or polynucleotides of the invention, and/or agonists or antagonists thereof, include, but are not limited to, chronic granulomatous disease, Chediak-Higashi syndrome, myeloperoxidase deficiency, leukocyte glucose-6-phosphate dehydrogenase deficiency, X-linked lymphoproliferative syndrome (XLP), leukocyte adhesion deficiency, complement component deficiencies (including C1, C2, C3, C4, C5, C6, C7, C8 and/or C9 deficiencies), reticular dysgenesis, thymic alymphoplasia-aplasia, immunodeficiency with thymoma, severe congenital leukopenia, dysplasia with immunodeficiency, neonatal neutropenia, short limbed dwarfism, and Nezelof syndrome-combined immunodeficiency with Igs.

[0502] In a preferred embodiment, the immunodeficiencies and/or conditions associated with the immunodeficiencies recited above are treated, prevented, diagnosed and/or prognosed using polynucleotides, polypeptides, antibodies, and/or agonists or antagonists of the present invention.

[0503] In a preferred embodiment polynucleotides, polypeptides, antibodies, and/or agonists or antagonists of the present invention could be used as an agent to boost immunoresponsiveness among immunodeficient individuals. In specific embodiments, polynucleotides, polypeptides, antibodies, and/or agonists or antagonists of the present invention could be used as an agent to boost immunoresponsiveness among B cell and/or T cell immunodeficient individuals.

[0504] The polynucleotides, polypeptides, antibodies, and/or agonists or antagonists of the present invention may be useful in treating, preventing, diagnosing and/or prognosing autoimmune disorders. Many autoimmune disorders result from inappropriate recognition of self as foreign material by immune cells. This inappropriate recognition results in an immune response leading to the destruction of the host tissue. Therefore, the administration of polynucleotides and polypeptides of the invention that can inhibit an immune response, particularly the proliferation, differentiation, or chemotaxis of T-cells, may be an effective therapy in preventing autoimmune disorders.

[0505] Autoimmune diseases or disorders that may be treated, prevented, diagnosed and/or prognosed by polynucleotides, polypeptides, antibodies, and/or agonists or antagonists of the present invention include, but are not limited to, one or more of the following: systemic lupus erythematosus, rheumatoid arritis, ankylosing spondylitis, multiple sclerosis, autoimmune thyroiditis, Hashimoto's thyroiditis, autoimmune hemolytic anemia, hemolytic anemia, thrombocytopenia, autoimmune thrombocytopenia purpura, autoimmune neonatal thrombocytopenia, idiopathic thrombocytopenia purpura, purpura (e.g., Henloch-Scoenlein purpura), autoimmunocytopenia, Goodpasture's syndrome, Pemphigus vulgaris, myasthenia gravis, Grave's disease (hyperthyroidism), and insulin-resistant diabetes mellitus.

[0506] Additional disorders that are likely to have an autoimmune component that may be treated, prevented, and/or diagnosed with the compositions of the invention include, but are not limited to, type II collagen-induced arthritis, antiphospholipid syndrome, dermatitis, allergic encephalomyelitis, myocarditis, relapsing polychondritis, rheumatic heart disease, neuritis, uveitis ophthalmia, polyendocrinopathies, Reiter's Disease, Stiff-Man Syndrome, autoimmune pulmonary inflammation, autism, Guillain-Barre Syndrome, insulin dependent diabetes mellitus, and autoimmune inflammatory eye disorders.

[0507] Additional disorders that are likely to have an autoimmune component that may be treated, prevented, diagnosed and/or prognosed with the compositions of the invention include, but are not limited to, scleroderma with anti-collagen antibodies (often characterized, e.g., by nucleolar and other nuclear antibodies), mixed connective tissue disease (often characterized, e.g., by antibodies to extractable nuclear antigens (e.g., ribonucleoprotein)), polymyositis (often characterized, e.g., by nonhistone ANA), pernicious anemia (often characterized, e.g., by antiparietal cell, microsomes, and intrinsic factor antibodies), idiopathic Addison's disease (often characterized, e.g., by humoral and cell-mediated adrenal cytotoxicity, infertility (often characterized, e.g., by antispermatozoal antibodies), glomerulonephritis (often characterized, e.g., by glomerular basement membrane antibodies or immune complexes), bullous pemphigoid (often characterized, e.g., by IgG and complement in basement membrane), Sjogren's syndrome (often characterized, e.g., by multiple tissue antibodies, and/or a specific nonhistone ANA (SS-B)), diabetes mellitus (often characterized, e.g., by cell-mediated and humoral islet cell antibodies), and adrenergic drug resistance (including adrenergic drug resistance with asthma or cystic fibrosis) (often characterized, e.g., by beta-adrenergic receptor antibodies).

[0508] Additional disorders that may have an autoimmune component that may be treated, prevented, diagnosed and/or prognosed with the compositions of the invention include, but are not limited to, chronic active hepatitis (often characterized, e.g., by smooth muscle antibodies), primary biliary cirrhosis (often characterized, e.g., by mitochondria antibodies), other endocrine gland failure (often characterized, e.g., by specific tissue antibodies in some cases), vitiligo (often characterized, e.g., by melanocyte antibodies), vasculitis (often characterized, e.g., by Ig and complement in vessel walls and/or low serum complement), post-MI (often characterized, e.g., by myocardial antibodies), cardiotomy syndrome (often characterized, e.g., by myocardial antibodies), urticaria (often characterized, e.g., by IgG and IgM antibodies to IgE), atopic dermatitis (often characterized, e.g., by IgG and IgM antibodies to IgE), asthma (often characterized, e.g., by IgG and IgM antibodies to IgE), and many other inflammatory, granulomatous, degenerative, and atrophic disorders.

[0509] In a preferred embodiment, the autoimmune diseases and disorders and/or conditions associated with the diseases and disorders recited above are treated, prevented, diagnosed and/or prognosed using for example, antagonists or agonists, polypeptides or polynucleotides, or antibodies of the present invention. In a specific preferred embodiment, rheumatoid arthritis is treated, prevented, and/or diagnosed using polynucleotides, polypeptides, antibodies, and/or agonists or antagonists of the present invention.

[0510] In another specific preferred embodiment, systemic lupus erythematosus is treated, prevented, and/or diagnosed using polynucleotides, polypeptides, antibodies, and/or agonists or antagonists of the present invention. In another specific preferred embodiment, idiopathic thrombocytopenia purpura is treated, prevented, and/or diagnosed using polynucleotides, polypeptides, antibodies, and/or agonists or antagonists of the present invention.

[0511] In another specific preferred embodiment IgA nephropathy is treated, prevented, and/or diagnosed using polynucleotides, polypeptides, antibodies, and/or agonists or antagonists of the present invention.

[0512] In a preferred embodiment, the autoimmune diseases and disorders and/or conditions associated with the diseases and disorders recited above are treated, prevented, diagnosed and/or prognosed using polynucleotides, polypeptides, antibodies, and/or agonists or antagonists of the present invention.

[0513] In preferred embodiments, polypeptides, antibodies, polynucleotides and/or agonists or antagonists of the present invention are used as a immunosuppressive agent(s).

[0514] Polynucleotides, polypeptides, antibodies, and/or agonists or antagonists of the present invention may be useful in treating, preventing, prognosing, and/or diagnosing diseases, disorders, and/or conditions of hematopoietic cells. Polynucleotides, polypeptides, antibodies, and/or agonists or antagonists of the present invention could be used to increase differentiation and proliferation of hematopoietic cells, including the pluripotent stem cells, in an effort to treat or prevent those diseases, disorders, and/or conditions associated with a decrease in certain (or many) types hematopoietic cells, including but not limited to, leukopenia, neutropenia, anemia, and thrombocytopenia. Alternatively, Polynucleotides, polypeptides, antibodies, and/or agonists or antagonists of the present invention could be used to increase differentiation and proliferation of hematopoietic cells, including the pluripotent stem cells, in an effort to treat or prevent those diseases, disorders, and/or conditions associated with an increase in certain (or many) types of hematopoietic cells, including but not limited to, histiocytosis.

[0515] Allergic reactions and conditions, such as asthma (particularly allergic asthma) or other respiratory problems, may also be treated, prevented, diagnosed and/or prognosed using polypeptides, antibodies, or polynucleotides of the invention, and/or agonists or antagonists thereof. Moreover, these molecules can be used to treat, prevent, prognose, and/or diagnose anaphylaxis, hypersensitivity to an antigenic molecule, or blood group incompatibility.

[0516] Additionally, polypeptides or polynucleotides of the invention, and/or agonists or antagonists thereof, may be used to treat, prevent, diagnose and/or prognose IgE-mediated allergic reactions. Such allergic reactions include, but are not limited to, asthma, rhinitis, and eczema. In specific embodiments, polynucleotides, polypeptides, antibodies, and/or agonists or antagonists of the. present invention may be used to modulate IgE concentrations in vitro or in vivo.

[0517] Moreover, polynucleotides, polypeptides, antibodies, and/or agonists or antagonists of the present invention have uses in the diagnosis, prognosis, prevention, and/or treatment of inflammatory conditions. For example, since polypeptides, antibodies, or polynucleotides of the invention, and/or agonists or antagonists of the invention may inhibit the activation, proliferation and/or differentiation of cells involved in an inflammatory response, these molecules can be used to prevent and/or treat chronic and acute inflammatory conditions. Such inflammatory conditions include, but are not limited to, for example, inflammation associated with infection (e.g., septic shock, sepsis, or systemic inflammatory response syndrome), ischemia-reperfusion injury, endotoxin lethality, complement-mediated hyperacute rejection, nephritis, cytokine or chemokine induced lung injury, inflammatory bowel disease, Crohn's disease, over production of cytokines (e.g., TNF or IL-1.), respiratory disorders (e.g., asthma and allergy); gastrointestinal disorders (e.g., inflammatory bowel disease); cancers (e.g., gastric, ovarian, lung, bladder, liver, and breast); CNS disorders (e.g., multiple sclerosis; ischemic brain injury and/or stroke, traumatic brain injury, neurodegenerative disorders (e.g., Parkinson's disease and Alzheimer's disease); AIDS-related dementia; and prion disease); cardiovascular disorders (e.g., atherosclerosis, myocarditis, cardiovascular disease, and cardiopulmonary bypass complications); as well as many additional diseases, conditions, and disorders that are characterized by inflammation (e.g., hepatitis, rheumatoid arthritis, gout, trauma, pancreatitis, sarcoidosis, dermatitis, renal ischemia-reperfusion injury, Grave's disease, systemic lupus erythematosus, diabetes mellitus, and allogenic transplant rejection).

[0518] Because inflammation is a fundamental defense mechanism, inflammatory disorders can effect virtually any tissue of the body. Accordingly, polynucleotides, polypeptides, and antibodies of the invention, as well as agonists or antagonists thereof, have uses in the treatment of tissue-specific inflammatory disorders, including, but not limited to, adrenalitis, alveolitis, angiocholecystitis, appendicitis, balanitis, blepharitis, bronchitis, bursitis, carditis, cellulitis, cervicitis, cholecystitis, chorditis, cochlitis, colitis, conjunctivitis, cystitis, dermatitis, diverticulitis, encephalitis, endocarditis, esophagitis, eustachitis, fibrositis, folliculitis, gastritis, gastroenteritis, gingivitis, glossitis, hepatosplenitis, keratitis, labyrinthitis, laryngitis, lymphangitis, mastitis, media otitis, meningitis, metritis, mucitis, myocarditis, myosititis, myringitis, nephritis, neuritis, orchitis, osteochondritis, otitis, pericarditis, peritendonitis, peritonitis, pharyngitis, phlebitis, poliomyelitis, prostatitis, pulpitis, retinitis, rhinitis, salpingitis, scleritis, scierochoroiditis, scrotitis, sinusitis, spondylitis, steatitis, stomatitis, synovitis, syringitis, tendonitis, tonsillitis, urethritis, and vaginitis.

[0519] In specific embodiments, polypeptides, antibodies, or polynucleotides of the invention, and/or agonists or antagonists thereof, are useful to diagnose, prognose, prevent, and/or treat organ transplant rejections and graft-versus-host disease. Organ rejection occurs by host immune cell destruction of the transplanted tissue through an immune response. Similarly, an immune response is also involved in GVHD, but, in this case, the foreign transplanted immune cells destroy the host tissues. Polypeptides, antibodies, or polynucleotides of the invention, and/or agonists or antagonists thereof, that inhibit an immune response, particularly the activation, proliferation, differentiation, or chemotaxis of T-cells, may be an effective therapy in preventing organ rejection or GVHD. In specific embodiments, polypeptides, antibodies, or polynucleotides of the invention, and/or agonists or antagonists thereof, that inhibit an immune response, particularly the activation, proliferation, differentiation, or chemotaxis of T-cells, may be an effective therapy in preventing experimental allergic and hyperacute xenograft rejection.

[0520] In other embodiments, polypeptides, antibodies, or polynucleotides of the invention, and/or agonists or antagonists thereof, are useful to diagnose, prognose, prevent, and/or treat immune complex diseases, including, but not limited to, serum sickness, post streptococcal glomerulonephritis, polyarteritis nodosa, and immune complex-induced vasculitis.

[0521] Polypeptides, antibodies, polynucleotides and/or agonists or antagonists of the invention can be used to treat, detect, and/or prevent infectious agents. For example, by increasing the immune response, particularly increasing the proliferation activation and/or differentiation of B and/or T cells, infectious diseases may be treated, detected, and/or prevented. The immune response may be increased by either enhancing an existing immune response, or by initiating a new immune response. Alternatively, polynucleotides, polypeptides, antibodies, and/or agonists or antagonists of the present invention may also directly inhibit the infectious agent (refer to section of application listing infectious agents, etc), without necessarily eliciting an immune response.

[0522] In another embodiment, polypeptides, antibodies, polynucleotides and/or agonists or antagonists of the present invention are used as a vaccine adjuvant that enhances immune responsiveness to an antigen. In a specific embodiment, polypeptides, antibodies, polynucleotides and/or agonists or antagonists of the present invention are used as an adjuvant to enhance tumor-specific immune responses.

[0523] In another specific embodiment, polypeptides, antibodies, polynucleotides and/or agonists or antagonists of the present invention are used as an adjuvant to enhance anti-viral immune responses. Anti-viral immune responses that may be enhanced using the compositions of the invention as an adjuvant, include virus and virus associated diseases or symptoms described herein or otherwise known in the art. In specific embodiments, the compositions of the invention are used as an adjuvant to enhance an immune response to a virus, disease, or symptom selected from the group consisting of: AIDS, meningitis, Dengue, EBV, and hepatitis (e.g., hepatitis B). In another specific embodiment, the compositions of the invention are used as an adjuvant to enhance an immune response to a virus, disease, or symptom selected from the group consisting of: HIVIAIDS, respiratory syncytial virus, Dengue, rotavirus, Japanese B encephalitis, influenza A and B, parainfluenza, measles, cytomegalovirus, rabies, Junin, Chikungunya, Rift Valley Fever, herpes simplex, and yellow fever.

[0524] In another specific embodiment, polypeptides, antibodies, polynucleotides and/or agonists or antagonists of the present invention are used as an adjuvant to enhance anti-bacterial or anti-fungal immune responses. Anti-bacterial or anti-fungal immune responses that may be enhanced using the compositions of the invention as an adjuvant, include bacteria or fungus and bacteria or fungus associated diseases or symptoms described herein or otherwise known in the art. In specific embodiments, the compositions of the invention are used as an adjuvant to enhance an immune response to a bacteria or fungus, disease, or symptom selected from the group consisting of: tetanus, Diphtheria, botulism, and meningitis type B.

[0525] In another specific embodiment, the compositions of the invention are used as an adjuvant to enhance an immune response to a bacteria or fungus, disease, or symptom selected from the group consisting of: Vibrio cholerae, Mycobacterium leprae, Salmonella typhi, Salmonella paratyphi, Meisseria meningitidis, Streptococcus pneumoniae, Group B streptococcus, Shigella spp., Enterotoxigenic Escherichia coli, Enterohemorrhagic E. coli, and Borrelia burgdorferi.

[0526] In another specific embodiment, polypeptides, antibodies, polynucleotides and/or agonists or antagonists of the present invention are used as an adjuvant to enhance anti-parasitic immune responses. Anti-parasitic immune responses that may be enhanced using the compositions of the invention as an adjuvant, include parasite and parasite associated diseases or symptoms described herein or otherwise known in the art. In specific embodiments, the compositions of the invention are used as an adjuvant to enhance an immune response to a parasite. In another specific embodiment, the compositions of the invention are used as an adjuvant to enhance an immune response to Plasmodium (malaria) or Leishmania.

[0527] In another specific embodiment, polypeptides, antibodies, polynucleotides and/or agonists or antagonists of the present invention may also be employed to treat infectious diseases including silicosis, sarcoidosis, and idiopathic pulmonary fibrosis; for example, by preventing the recruitment and activation of mononuclear phagocytes.

[0528] In another specific embodiment, polypeptides, antibodies, polynucleotides and/or agonists or antagonists of the present invention are used as an antigen for the generation of antibodies to inhibit or enhance immune mediated responses against polypeptides of the invention.

[0529] In one embodiment, polypeptides, antibodies, polynucleotides and/or agonists or antagonists of the present invention are administered to an animal (e.g., mouse, rat, rabbit, hamster, guinea pig, pigs, micro-pig, chicken, camel, goat, horse, cow, sheep, dog, cat, non-human primate, and human, most preferably human) to boost the immune system to produce increased quantities of one or more antibodies (e.g., IgG, IgA, IgM, and IgE), to induce higher affinity antibody production and immunoglobulin class switching (e.g., IgG, IgA, IgM, and IgE), and/or to increase an immune response.

[0530] In another specific embodiment, polypeptides, antibodies, polynucleotides and/or agonists or antagonists of the present invention are used as a stimulator of B cell responsiveness to pathogens.

[0531] In another specific embodiment, polypeptides, antibodies, polynucleotides and/or agonists or antagonists of the present invention are used as an activator of T cells.

[0532] In another specific embodiment, polypeptides, antibodies, polynucleotides and/or agonists or antagonists of the present invention are used as an agent that elevates the immune status of an individual prior to their receipt of immunosuppressive therapies.

[0533] In another specific embodiment, polypeptides, antibodies, polynucleotides and/or agonists or antagonists of the present invention are used as an agent to induce higher affinity antibodies.

[0534] In another specific embodiment, polypeptides, antibodies, polynucleotides and/or agonists or antagonists of the present invention are used as an agent to increase serum immunoglobulin concentrations.

[0535] In another specific embodiment, polypeptides, antibodies, polynucleotides and/or agonists or antagonists of the present invention are used as an agent to accelerate recovery of immunocompromised individuals.

[0536] In another specific embodiment, polypeptides, antibodies, polynucleotides and/or agonists or antagonists of the present invention are used as an agent to boost immunoresponsiveness among aged populations and/or neonates.

[0537] In another specific embodiment, polypeptides, antibodies, polynucleotides and/or agonists or antagonists of the present invention are used as an immune system enhancer prior to, during, or after bone marrow transplant and/or other transplants (e.g., allogeneic or xenogeneic organ transplantation). With respect to transplantation, compositions of the invention may be administered prior to, concomitant with, and/or after transplantation. In a specific embodiment, compositions of the invention are administered after transplantation, prior to the beginning of recovery of T-cell populations. In another specific embodiment, compositions of the invention are first administered after transplantation after the beginning of recovery of T cell populations, but prior to full recovery of B cell populations.

[0538] In another specific embodiment, polypeptides, antibodies, polynucleotides and/or agonists or antagonists of the present invention are used as an agent to boost immunoresponsiveness among individuals having an acquired loss of B cell function. Conditions resulting in an acquired loss of B cell function that may be ameliorated or treated by administering the polypeptides, antibodies, polynucleotides and/or agonists or antagonists thereof, include, but are not limited to, HIV Infection, AIDS, bone marrow transplant, and B cell chronic lymphocytic leukemia (CLL).

[0539] In another specific embodiment, polypeptides, antibodies, polynucleotides and/or agonists or antagonists of the present invention are used as an agent to boost immunoresponsiveness among individuals having a temporary immune deficiency. Conditions resulting in a temporary immune deficiency that may be ameliorated or treated by administering the polypeptides, antibodies, polynucleotides and/or agonists or antagonists thereof, include, but are not limited to, recovery from viral infections (e.g., influenza), conditions associated with malnutrition, recovery from infectious mononucleosis, or conditions associated with stress, recovery from measles, recovery from blood transfusion, and recovery from surgery.

[0540] In another specific embodiment, polypeptides, antibodies, polynucleotides and/or agonists or antagonists of the present invention are used as a regulator of antigen presentation by monocytes, dendritic cells, and/or B-cells. In one embodiment, polynucleotides, polypeptides, antibodies, and/or agonists or antagonists of the present invention enhance antigen presentation or antagonizes antigen presentation in vitro or in vivo. Moreover, in related embodiments, said enhancement or antagonism of antigen presentation may be useful as an anti-tumor treatment or to modulate the immune system.

[0541] In another specific embodiment, polypeptides, antibodies, polynucleotides and/or agonists or antagonists of the present invention are used as an agent to direct an individual's immune system towards development of a humoral response (i.e. TH2) as opposed to a TH1 cellular response.

[0542] In another specific embodiment, polypeptides, antibodies, polynucleotides and/or agonists or antagonists of the present invention are used as a means to induce tumor proliferation and thus make it more susceptible to anti-neoplastic agents. For example, multiple myeloma is a slowly dividing disease and is thus refractory to virtually all anti-neoplastic regimens. If these cells were forced to proliferate more rapidly their susceptibility profile would likely change.

[0543] In another specific embodiment, polypeptides, antibodies, polynucleotides and/or agonists or antagonists of the present invention are used as a stimulator of B cell production in pathologies such as AIDS, chronic lymphocyte disorder and/or Common Variable Immunodificiency.

[0544] In another specific embodiment, polypeptides, antibodies, polynucleotides and/or agonists or antagonists of the present invention are used as a therapy for generation and/or regeneration of lymphoid tissues following surgery, trauma or genetic defect. In another specific embodiment, polypeptides, antibodies, polynucleotides and/or agonists or antagonists of the present invention are used in the pretreatment of bone marrow samples prior to transplant.

[0545] In another specific embodiment, polypeptides, antibodies, polynucleotides and/or agonists or antagonists of the present invention are used as a gene-based therapy for genetically inherited disorders resulting in immuno-incompetence/immunodeficiency such as observed among SCID patients.

[0546] In another specific embodiment, polypeptides, antibodies, polynucleotides and/or agonists or antagonists of the present invention are used as a means of activating monocytes/macrophages to defend against parasitic diseases that effect monocytes such as Leishmania.

[0547] In another specific embodiment, polypeptides, antibodies, polynucleotides and/or agonists or antagonists of the present invention are used as a means of regulating secreted cytokines that are elicited by polypeptides of the invention.

[0548] In another embodiment, polypeptides, antibodies, polynucleotides and/or agonists or antagonists of the present invention are used in one or more of the applications decribed herein, as they may apply to veterinary medicine.

[0549] In another specific embodiment, polypeptides, antibodies, polynucleotides and/or agonists or antagonists of the present invention are used as a means of blocking various aspects of immune responses to foreign agents or self. Examples of diseases or conditions in which blocking of certain aspects of immune responses may be desired include autoimmune disorders such as lupus, and arthritis, as well as immunoresponsiveness to skin allergies, inflammation, bowel disease, injury and diseases/disorders associated with pathogens.

[0550] In another specific embodiment, polypeptides, antibodies, polynucleotides and/or agonists or antagonists of the present invention are used as a therapy for preventing the B cell proliferation and Ig secretion associated with autoimmune diseases such as idiopathic thrombocytopenic purpura, systemic lupus erythematosus and multiple sclerosis.

[0551] In another specific embodiment, polypeptides, antibodies, polynucleotides and/or agonists or antagonists of the present invention are used as a inhibitor of B and/or T cell migration in endothelial cells. This activity disrupts tissue architecture or cognate responses and is useful, for example in disrupting immune responses, and blocking sepsis.

[0552] In another specific embodiment, polypeptides, antibodies, polynucleotides and/or agonists or antagonists of the present invention are used as a therapy for chronic hypergammaglobulinemia evident in such diseases as monoclonal gammopathy of undetermined significance (MGUS), Waldenstrom's disease, related idiopathic monoclonal gammopathies, and plasmacytomas.

[0553] In another specific embodiment, polypeptides, antibodies, polynucleotides and/or agonists or antagonists of the present invention may be employed for instance to inhibit polypeptide chemotaxis and activation of macrophages and their precursors, and of neutrophils, basophils, B lymphocytes and some T-cell subsets, e.g., activated and CD8 cytotoxic T cells and natural killer cells, in certain autoimmune and chronic inflammatory and infective diseases. Examples of auto immune diseases are described herein and include multiple sclerosis, and insulin-dependent diabetes.

[0554] The polypeptides, antibodies, polynucleotides and/or agonists or antagonists of the present invention may also be employed to treat idiopathic hypereosinophilic syndrome by, for example, preventing eosinophil production and migration.

[0555] In another specific embodiment, polypeptides, antibodies, polynucleotides and/or agonists or antagonists of the present invention are used to enhance or inhibit complement mediated cell lysis.

[0556] In another specific embodiment, polypeptides, antibodies, polynucleotides and/or agonists or antagonists of the present invention are used to enhance or inhibit antibody dependent cellular cytotoxicity.

[0557] In another specific embodiment, polypeptides, antibodies, polynucleotides and/or agonists or antagonists of the present invention may also be employed for treating atherosclerosis, for example, by preventing monocyte infiltration in the artery wall.

[0558] In another specific embodiment, polypeptides, antibodies, polynucleotides and/or agonists or antagonists of the present invention may be employed to treat adult respiratory distress syndrome (ARDS).

[0559] In another specific embodiment, polypeptides, antibodies, polynucleotides and/or agonists or antagonists of the present invention may be useful for stimulating wound and tissue repair, stimulating angiogenesis, and/or stimulating the repair of vascular or lymphatic diseases or disorders. Additionally, agonists and antagonists of the invention may be used to stimulate the regeneration of mucosal surfaces.

[0560] In a specific embodiment, polynucleotides or polypeptides, and/or agonists thereof are used to diagnose, prognose, treat, and/or prevent a disorder characterized by primary or acquired immunodeficiency, deficient serum immunoglobulin production, recurrent infections, and/or immune system dysfunction. Moreover, polynucleotides or polypeptides, and/or agonists thereof may be used to treat or prevent infections of the joints, bones, skin, and/or parotid glands, blood-borne infections (e.g., sepsis, meningitis, septic arthritis, and/or osteomyelitis), autoimmune diseases (e.g., those disclosed herein), inflammatory disorders, and malignancies, and/or any disease or disorder or condition associated with these infections, diseases, disorders and/or malignancies) including, but not limited to, CVID, other primary immune deficiencies, HIV disease, CLL, recurrent bronchitis, sinusitis, otitis media, conjunctivitis, pneumonia, hepatitis, meningitis, herpes zoster (e.g., severe herpes zoster), and/or pneumocystis carnii. Other diseases and disorders that may be prevented, diagnosed, prognosed, and/or treated with polynucleotides or polypeptides, and/or agonists of the present invention include, but are not limited to, HIV infection, HTLV-BLV infection, lymphopenia, phagocyte bactericidal dysfunction anemia, thrombocytopenia, and hemoglobinuria.

[0561] In another embodiment, polynucleotides, polypeptides, antibodies, and/or agonists or antagonists of the present invention are used to treat, and/or diagnose an individual having common variable immunodeficiency disease (“CVID”; also known as “acquired agammaglobulinemia” and “acquired hypogammaglobulinemia”) or a subset of this disease.

[0562] In a specific embodiment, polynucleotides, polypeptides, antibodies, and/or agonists or antagonists of the present invention may be used to diagnose, prognose, prevent, and/or treat cancers or neoplasms including immune cell or immune tissue-related cancers or neoplasms. Examples of cancers or neoplasms that may be prevented, diagnosed, or treated by polynucleotides, polypeptides, antibodies, and/or agonists or antagonists of the present invention include, but are not limited to, acute myelogenous leukemia, chronic myelogenous leukemia, Hodgkin's disease, non-Hodgkin's lymphoma, acute lymphocytic anemia (ALL) Chronic lymphocyte leukemia, plasmacytomas, multiple myeloma, Burkitt's lymphoma, EBV-transformed diseases, and/or diseases and disorders described in the section entitled “Hyperproliferative Disorders” elsewhere herein.

[0563] In another specific embodiment, polypeptides, antibodies, polynucleotides and/or agonists or antagonists of the present invention are used as a therapy for decreasing cellular proliferation of Large B-cell Lymphomas.

[0564] In another specific embodiment, polypeptides, antibodies, polynucleotides and/or agonists or antagonists of the present invention are used as a means of decreasing the involvement of B cells and Ig associated with Chronic Myelogenous Leukemia.

[0565] In specific embodiments, the compositions of the invention are used as an agent to boost immunoresponsiveness among B cell immunodeficient individuals, such as, for example, an individual who has undergone a partial or complete splenectomy.

[0566] Antagonists of the invention include, for example, binding and/or inhibitory antibodies, antisense nucleic acids, ribozymes or soluble forms of the polypeptides of the present invention (e.g., Fc fusion protein; see, e.g., Example 9). Agonists of the invention include, for example, binding or stimulatory antibodies, and soluble forms of the polypeptides (e.g., Fc fusion proteins; see, e.g., Example 9). Polypeptides, antibodies, polynucleotides and/or agonists or antagonists of the present invention may be employed in a composition with a pharmaceutically acceptable carrier, e.g., as described herein.

[0567] In another embodiment, polypeptides, antibodies, polynucleotides and/or agonists or antagonists of the present invention are administered to an animal (including, but not limited to, those listed above, and also including transgenic animals) incapable of producing functional endogenous antibody molecules or having an otherwise compromised endogenous immune system, but which is capable of producing human immunoglobulin molecules by means of a reconstituted or partially reconstituted immune system from another animal (see, e.g., published PCT Application Nos. WO98/24893, WO/9634096, WO/9633735, and WO/9110741). Administration of polypeptides, antibodies, polynucleotides and/or agonists or antagonists of the present invention to such animals is useful for the generation of monoclonal antibodies against the polypeptides, antibodies, polynucleotides and/or agonists or antagonists of the present invention.

[0568] Blood-related Disorders

[0569] The polynucleotides, polypeptides, antibodies, and/or agonists or antagonists of the present invention may be used to modulate hemostatic (the stopping of bleeding) or thrombolytic (clot dissolving) activity. For example, by increasing hemostatic or thrombolytic activity, polynucleotides or polypeptides, and/or agonists or antagonists of the present invention could be used to treat or prevent blood coagulation diseases, disorders, and/or conditions (e.g., afibrinogenemia, factor deficiencies, hemophilia), blood platelet diseases, disorders, and/or conditions (e.g., thrombocytopenia), or wounds resulting from trauma, surgery, or other causes. Alternatively, polynucleotides, polypeptides, antibodies, and/or agonists or antagonists of the present invention that can decrease hemostatic or thrombolytic activity could be used to inhibit or dissolve clotting. These molecules could be important in the treatment or prevention of heart attacks (infarction), strokes, or scarring.

[0570] In specific embodiments, the polynucleotides, polypeptides, antibodies, and/or agonists or antagonists of the present invention may be used to prevent, diagnose, prognose, and/or treat thrombosis, arterial thrombosis, venous thrombosis, thromboembolism, pulmonary embolism, atherosclerosis, myocardial infarction, transient ischemic attack, unstable angina. In specific embodiments, the polynucleotides, polypeptides, antibodies, and/or agonists or antagonists of the present invention may be used for the prevention of occulsion of saphenous grafts, for reducing the risk of periprocedural thrombosis as might accompany angioplasty procedures, for reducing the risk of stroke in patients with atrial fibrillation including nonrheumatic atrial fibrillation, for reducing the risk of embolism associated with mechanical heart valves and or mitral valves disease. Other uses for the polynucleotides, polypeptides, antibodies, and/or agonists or antagonists of the present invention, include, but are not limited to, the prevention of occlusions in extrcorporeal devices (e.g., intravascular canulas, vascular access shunts in hemodialysis patients, hemodialysis machines, and cardiopulmonary bypass machines).

[0571] In another embodiment, a polypeptide of the invention, or polynucleotides, antibodies, agonists, or antagonists corresponding to that polypeptide, may be used to prevent, diagnose, prognose, and/or treat diseases and disorders of the blood and/or blood forming organs associated with the tissue(s) in which the polypeptide of the invention is expressed, including one, two, three, four, five, or more tissues disclosed in Table 1A, column 7 (Tissue Distribution Library Code).

[0572] The polynucleotides, polypeptides, antibodies, and/or agonists or antagonists of the present invention may be used to modulate hematopoietic activity (the formation of blood cells). For example, the polynucleotides, polypeptides, antibodies, and/or agonists or antagonists of the present invention may be used to increase the quantity of all or subsets of blood cells, such as, for example, erythrocytes, lymphocytes (B or T cells), myeloid cells (e.g., basophils, eosinophils, neutrophils, mast cells, macrophages) and platelets. The ability to decrease the quantity of blood cells or subsets of blood cells may be useful in the prevention, detection, diagnosis and/or treatment of anemias and leukopenias described below. Alternatively, the polynucleotides, polypeptides, antibodies, and/or agonists or antagonists of the present invention may be used to decrease the quantity of all or subsets of blood cells, such as, for example, erythrocytes, lymphocytes (B or T cells), myeloid cells (e.g., basophils, eosinophils, neutrophils, mast cells, macrophages) and platelets. The ability to decrease the quantity of blood cells or subsets of blood cells may be useful in the prevention, detection, diagnosis and/or treatment of leukocytoses, such as, for example eosinophilia.

[0573] The polynucleotides, polypeptides, antibodies, and/or agonists or antagonists of the present invention may be used to prevent, treat, or diagnose blood dyscrasia.

[0574] Anemias are conditions in which the number of red blood cells or amount of hemoglobin (the protein that carries oxygen) in them is below normal. Anemia may be caused by excessive bleeding, decreased red blood cell production, or increased red blood cell destruction (hemolysis). The polynucleotides, polypeptides, antibodies, and/or agonists or antagonists of the present invention may be useful in treating, preventing, and/or diagnosing anemias. Anemias that may be treated prevented or diagnosed by the polynucleotides, polypeptides, antibodies, and/or agonists or antagonists of the present invention include iron deficiency anemia, hypochromic anemia, microcytic anemia, chlorosis, hereditary siderob;astic anemia, idiopathic acquired sideroblastic anemia, red cell aplasia, megaloblastic anemia (e.g., pernicious anemia, (vitamin B12 deficiency) and folic acid deficiency anemia), aplastic anemia, hemolytic anemias (e.g., autoimmune helolytic anemia, microangiopathic hemolytic anemia, and paroxysmal nocturnal hemoglobinuria). The polynucleotides, polypeptides, antibodies, and/or agonists or antagonists of the present invention may be useful in treating, preventing, and/or diagnosing anemias associated with diseases including but not limited to, anemias associated with systemic lupus erythematosus, cancers, lymphomas, chronic renal disease, and enlarged spleens. The polynucleotides, polypeptides, antibodies, and/or agonists or antagonists of the present invention may be useful in treating, preventing, and/or diagnosing anemias arising from drug treatments such as anemias associated with methyldopa, dapsone, and/or sulfadrugs. Additionally, rhe polynucleotides, polypeptides, antibodies, and/or agonists or antagonists of the present invention may be useful in treating, preventing, and/or diagnosing anemias associated with abnormal red blood cell architecture including but not limited to, hereditary spherocytosis, hereditary elliptocytosis, glucose-6-phosphate dehydrogenase deficiency, and sickle cell anemia.

[0575] The polynucleotides, polypeptides, antibodies, and/or agonists or antagonists of the present invention may be usefull in treating, preventing, and/or diagnosing hemoglobin abnormalities, (e.g., those associated with sickle cell anemia, hemoglobin C disease, hemoglobin S-C disease, and hemoglobin E disease). Additionally, the polynucleotides, polypeptides, antibodies, and/or agonists or antagonists of the present invention may be useful in diagnosing, prognosing, preventing, and/or treating thalassemias, including, but not limited to major and minor forms of alpha-thalassemia and beta-thalassemia.

[0576] In another embodiment, the polynucleotides, polypeptides, antibodies, and/or agonists or antagonists of the present invention may be useful in diagnosing, prognosing, preventing, and/or treating bleeding disorders including, but not limited to, thrombocytopenia (e.g., idiopathic thrombocytopenic purpura, and thrombotic thrombocytopenic purpura), Von Willebrand's disease, hereditary platelet disorders (e.g., storage pool disease such as Chediak-Higashi and Hermansky-Pudlak syndromes, thromboxane A2 dysfunction, thromboasthenia, and Bernard-Soulier syndrome), hemolytic-uremic syndrome, hemophelias such as hemophelia A or Factor VII deficiency and Christmas disease or Factor IX deficiency, Hereditary Hemorhhagic Telangiectsia, also known as Rendu-Osler-Weber syndrome, allergic purpura (Henoch Schonlein purpura) and disseminated intravascular coagulation.

[0577] The effect of the polynucleotides, polypeptides, antibodies, and/or agonists or antagonists of the present invention on the clotting time of blood may be monitored using any of the clotting tests known in the art including, but not limited to, whole blood partial thromboplastin time (PTT), the activated partial thromboplastin time (aPTT), the activated clotting time (ACT), the recalcified activated clotting time, or the Lee-White Clotting time.

[0578] Several diseases and a variety of drugs can cause platelet dysfunction. Thus, in a specific embodiment, the polynucleotides, polypeptides, antibodies, and/or agonists or antagonists of the present invention may be useful in diagnosing, prognosing, preventing, and/or treating acquired platelet dysfunction such as platelet dysfunction accompanying kidney failure, leukemia, multiple myeloma, cirrhosis of the liver, and systemic lupus erythematosus as well as platelet dysfunction associated with drug treatments, including treatment with aspirin, ticlopidine, nonsteroidal anti-inflammatory drugs (used for arthritis, pain, and sprains), and penicillin in high doses.

[0579] In another embodiment, the polynucleotides, polypeptides, antibodies, and/or agonists or antagonists of the present invention may be useful in diagnosing, prognosing, preventing, and/or treating diseases and disorders characterized by or associated with increased or decreased numbers of white blood cells. Leukopenia occurs when the number of white blood cells decreases below normal. Leukopenias include, but are not limited to, neutropenia and lymphocytopenia. An increase in the number of white blood cells compared to normal is known as leukocytosis. The body generates increased numbers of white blood cells during infection. Thus, leukocytosis may simply be a normal physiological parameter that reflects infection. Alternatively, leukocytosis may be an indicator of injury or other disease such as cancer. Leokocytoses, include but are not limited to, eosinophilia, and accumulations of macrophages. In specific embodiments, the polynucleotides, polypeptides, antibodies, and/or agonists or antagonists of the present invention may be useful in diagnosing, prognosing, preventing, and/or treating leukopenia. In other specific embodiments, the polynucleotides, polypeptides, antibodies, and/or agonists or antagonists of the present invention may be useful in diagnosing, prognosing, preventing, and/or treating leukocytosis

[0580] Leukopenia may be a generalized decreased in all types of white blood cells, or may be a specific depletion of particular types of white blood cells. Thus, in specific embodiments, the polynucleotides, polypeptides, antibodies, and/or agonists or antagonists of the present invention may be useful in diagnosing, prognosing, preventing, and/or treating decreases in neutrophil numbers, known as neutropenia. Neutropenias that may be diagnosed, prognosed, prevented, and/or treated by the polynucleotides, polypeptides, antibodies, and/or agonists or antagonists of the present invention include, but are not limited to, infantile genetic agranulocytosis, familial neutropenia, cyclic neutropenia, neutropenias resulting from or associated with dietary deficiencies (e.g., vitamin B 12 deficiency or folic acid deficiency), neutropenias resulting from or associated with drug treatments (e.g., antibiotic regimens such as penicillin treatment, sulfonamide treatment, anticoagulant treatment, anticonvulsant drugs, anti-thyroid drugs, and cancer chemotherapy), and neutropenias resulting from increased neutrophil destruction that may occur in association with some bacterial or viral infections, allergic disorders, autoimmune diseases, conditions in which an individual has an enlarged spleen (e.g., Felty syndrome, malaria and sarcoidosis), and some drug treatment regimens.

[0581] The polynucleotides, polypeptides, antibodies, and/or agonists or antagonists of the present invention may be useful in diagnosing, prognosing, preventing, and/or treating lymphocytopenias (decreased numbers of B and/or T lymphocytes), including, but not limited lymphocytopenias resulting from or associated with stress, drug treatments (e.g., drug treatment with corticosteroids, cancer chemotherapies, and/or radiation therapies), AIDS infection and/or other diseases such as, for example, cancer, rheumatoid arthritis, systemic lupus erythematosus, chronic infections, some viral infections and/or hereditary disorders (e.g., DiGeorge syndrome, Wiskott-Aldrich Syndome, severe combined immunodeficiency, ataxia telangiectsia).

[0582] The polynucleotides, polypeptides, antibodies, and/or agonists or antagonists of the present invention may be useful in diagnosing, prognosing, preventing, and/or treating diseases and disorders associated with macrophage numbers and/or macrophage function including, but not limited to, Gaucher's disease, Niemann-Pick disease, Letterer-Siwe disease and Hand-Schuller-Christian disease.

[0583] In another embodiment, the polynucleotides, polypeptides, antibodies, and/or agonists or antagonists of the present invention may be useful in diagnosing, prognosing, preventing, and/or treating diseases and disorders associated with eosinophil numbers and/or eosinophil function including, but not limited to, idiopathic hypereosinophilic syndrome, eosinophilia-myalgia syndrome, and Hand-Schuller-Christian disease.

[0584] In yet another embodiment, the polynucleotides, polypeptides, antibodies, and/or agonists or antagonists of the present invention may be useful in diagnosing, prognosing, preventing, and/or treating leukemias and lymphomas including, but not limited to, acute lymphocytic (lymphpblastic) leukemia (ALL), acute myeloid (myelocytic, myelogenous, myeloblastic, or myelomonocytic) leukemia, chronic lymphocytic leukemia (e.g., B cell leukemias, T cell leukemias, Sezary syndrome, and Hairy cell leukenia), chronic myelocytic (myeloid, myelogenous, or granulocytic) leukemia, Hodgkin's lymphoma, non-hodgkin's lymphoma, Burkitt's lymphoma, and mycosis fungoides.

[0585] In other embodiments, the polynucleotides, polypeptides, antibodies, and/or agonists or antagonists of the present invention may be useful in diagnosing, prognosing, preventing, and/or treating diseases and disorders of plasma cells including, but not limited to, plasma cell dyscrasias, monoclonal gammaopathies, monoclonal gammopathies of undetermined significance, multiple myeloma, macroglobulinemia, Waldenstrom's macroglobulinemia, cryoglobulinemia, and Raynaud's phenomenon.

[0586] In other embodiments, the polynucleotides, polypeptides, antibodies, and/or agonists or antagonists of the present invention may be useful in treating, preventing, and/or diagnosing myeloproliferative disorders, including but not limited to, polycythemia vera, relative polycythemia, secondary polycythemia, myelofibrosis, acute myelofibrosis, agnogenic myelod metaplasia, thrombocythemia, (including both primary and seconday thrombocythemia) and chronic myelocytic leukemia.

[0587] In other embodiments, the polynucleotides, polypeptides, antibodies, and/or agonists or antagonists of the present invention may be useful as a treatment prior to surgery, to increase blood cell production.

[0588] In other embodiments, the polynucleotides, polypeptides, antibodies, and/or agonists or antagonists of the present invention may be useful as an agent to enhance the migration, phagocytosis, superoxide production, antibody dependent cellular cytotoxicity of neutrophils, eosionophils and macrophages.

[0589] In other embodiments, the polynucleotides, polypeptides, antibodies, and/or agonists or antagonists of the present invention may be useful as an agent to increase the number of stem cells in circulation prior to stem cells pheresis. In another specific embodiment, the polynucleotides, polypeptides, antibodies, and/or agonists or antagonists of the present invention may be useful as an agent to increase the number of stem cells in circulation prior to platelet pheresis.

[0590] In other embodiments, the polynucleotides, polypeptides, antibodies, and/or agonists or antagonists of the present invention may be useful as an agent to increase cytokine production.

[0591] In other embodiments, the polynucleotides, polypeptides, antibodies, and/or agonists or antagonists of the present invention may be useful in preventing, diagnosing, and/or treating primary hematopoietic disorders.

[0592] Hyperproliferative Disorders

[0593] Colorectal cancer associated polynucleotides or polypeptides, or agonists or antagonists thereof, can be used to treat, prevent, diagnose and/or prognose hyperproliferative diseases, disorders, and/or conditions, including neoplasms.

[0594] In a specific embodiment, colorectal cancer associated polynucleotides or polypeptides, or agonists or antagonists thereof, can be used to treat, prevent, and/or diagnose hyperproliferative diseases, disorders, and/or conditions of the colon and/or rectum.

[0595] In a preferred embodiment, colorectal cancer associated polynucleotides or polypeptides, or agonists or antagonists thereof, can be used to treat, prevent, and/or diagnose colorectal neoplasms.

[0596] Colorectal cancer associated polynucleotides or polypeptides, or agonists or antagonists of the invention, may inhibit the proliferation of the disorder through direct or indirect interactions. Alternatively, colorectal cancer associated polynucleotides or polypeptides, or agonists or antagonists thereof, may proliferate other cells, which can inhibit the hyperproliferative disorder.

[0597] For example, by increasing an immune response, particularly increasing antigenic qualities of the hyperproliferative disorder or by proliferating, differentiating, or mobilizing T-cells, hyperproliferative diseases, disorders, and/or conditions can be treated, prevented, and/or diagnosed. This immune response may be increased by either enhancing an existing immune response, or by initiating a new immune response. Alternatively, decreasing an immune response may also be a method of treating, preventing, and/or diagnosing hyperproliferative diseases, disorders, and/or conditions, such as a chemotherapeutic agent.

[0598] Examples of hyperproliferative diseases, disorders, and/or conditions that can be treated, prevented, and/or diagnosed by colorectal cancer associated polynucleotides or polypeptides, or agonists or antagonists thereof, include, but are not limited to neoplasms located in the: prostate, colon, abdomen, bone, breast, digestive system, liver, pancreas, peritoneum, endocrine glands (adrenal, parathyroid, pituitary, testicles, ovary, thymus, thyroid), eye, head and neck, nervous (central and peripheral), lymphatic system, pelvic, skin, soft tissue, spleen, thoracic, and urogenital.

[0599] Similarly, other hyperproliferative disorders can also be treated or detected by polynucleotides or polypeptides, or agonists or antagonists of the present invention. Examples of such hyperproliferative disorders include, but are not limited to: Acute Childhood Lymphoblastic Leukemia, Acute Lymphoblastic Leukemia, Acute Lymphocytic Leukemia, Acute Myeloid Leukemia, Adrenocortical Carcinoma, Adult (Primary) Hepatocellular Cancer, Adult (Primary) Liver Cancer, Adult Acute Lymphocytic Leukemia, Adult Acute Myeloid Leukemia, Adult Hodgkin's Disease, Adult Hodgkin's Lymphoma, Adult Lymphocytic Leukemia, Adult Non-Hodgkin's Lymphoma, Adult Primary Liver Cancer, Adult Soft Tissue Sarcoma, AIDS-Related Lymphoma, AIDS-Related Malignancies, Anal Cancer, Astrocytoma, Bile Duct Cancer, Bladder Cancer, Bone Cancer, Brain Stem Glioma, Brain Tumors, Breast Cancer, Cancer of the Renal Pelvis and Ureter, Central Nervous System (Primary) Lymphoma, Central Nervous System Lymphoma, Cerebellar Astrocytoma, Cerebral Astrocytoma, Cervical Cancer, Childhood (Primary) Hepatocellular Cancer, Childhood (Primary) Liver Cancer, Childhood Acute Lymphoblastic Leukemia, Childhood Acute Myeloid Leukemia, Childhood Brain Stem Glioma, Childhood Cerebellar Astrocytoma, Childhood Cerebral Astrocytoma, Childhood Extracranial Germ Cell Tumors, Childhood Hodgkin's Disease, Childhood Hodgkin's Lymphoma, Childhood Hypothalamic and Visual Pathway Glioma, Childhood Lymphoblastic Leukemia, Childhood Medulloblastoma, Childhood Non-Hodgkin's Lymphoma, Childhood Pineal and Supratentorial Primitive Neuroectodermal Tumors, Childhood Primary Liver Cancer, Childhood Rhabdomyosarcoma, Childhood Soft Tissue Sarcoma, Childhood Visual Pathway and Hypothalamic Glioma, Chronic Lymphocytic Leukemia, Chronic Myelogenous Leukemia, Colon Cancer, Cutaneous T-Cell Lymphoma, Endocrine Pancreas Islet Cell Carcinoma, Endometrial Cancer, Ependymoma, Epithelial Cancer, Esophageal Cancer, Ewing's Sarcoma and Related Tumors, Exocrine Pancreatic Cancer, Extracranial Germ Cell Tumor, Extragonadal Germ Cell Tumor, Extrahepatic Bile Duct Cancer, Eye Cancer, Female Breast Cancer, Gaucher's Disease, Gallbladder Cancer, Gastric Cancer, Gastrointestinal Carcinoid Tumor, Gastrointestinal Tumors, Germ Cell Tumors, Gestational Trophoblastic Tumor, Hairy Cell Leukemia, Head and Neck Cancer, Hepatocellular Cancer, Hodgkin's Disease, Hodgkin's Lymphoma, Hypergammaglobulinemia, Hypopharyngeal Cancer, Intestinal Cancers, Intraocular Melanoma, Islet Cell Carcinoma, Islet Cell Pancreatic Cancer, Kaposi's Sarcoma, Kidney Cancer, Laryngeal Cancer, Lip and Oral Cavity Cancer, Liver Cancer, Lung Cancer, Lymphoproliferative Disorders, Macroglobulinemia, Male Breast Cancer, Malignant Mesothelioma, Malignant Thymoma, Medulloblastoma, Melanoma, Mesothelioma, Metastatic Occult Primary Squamous Neck Cancer, Metastatic Primary Squamous Neck Cancer, Metastatic Squamous Neck Cancer, Multiple Myeloma, Multiple Myeloma/Plasma Cell Neoplasm, Myelodysplastic Syndrome, Myelogenous Leukemia, Myeloid Leukemia, Myeloproliferative Disorders, Nasal Cavity and Paranasal Sinus Cancer, Nasopharyngeal Cancer, Neuroblastoma, Non-Hodgkin's Lymphoma During Pregnancy, Nonmelanoma Skin Cancer, Non-Small Cell Lung Cancer, Occult Primary Metastatic Squamous Neck Cancer, Oropharyngeal Cancer, Osteo-/Malignant Fibrous Sarcoma, Osteosarcoma/Malignant Fibrous Histiocytoma, Osteosarcoma/Malignant Fibrous Histiocytoma of Bone, Ovarian Epithelial Cancer, Ovarian Germ Cell Tumor, Ovarian Low Malignant Potential Tumor, Pancreatic Cancer, Paraproteinemias, Purpura, Parathyroid Cancer, Penile Cancer, Pheochromocytoma, Pituitary Tumor, Plasma Cell Neoplasm/Multiple Myeloma, Primary Central Nervous System Lymphoma, Primary Liver Cancer, Prostate Cancer, Rectal Cancer, Renal Cell Cancer, Renal Pelvis and Ureter Cancer, Retinoblastoma, Rhabdomyosarcoma, Salivary Gland Cancer, Sarcoidosis Sarcomas, Sezary Syndrome, Skin Cancer, Small Cell Lung Cancer, Small Intestine Cancer, Soft Tissue Sarcoma, Squamous Neck Cancer, Stomach Cancer, Supratentorial Primitive Neuroectodermal and Pineal Tumors, T-Cell Lymphoma, Testicular Cancer, Thymoma, Thyroid Cancer, Transitional Cell Cancer of the Renal Pelvis and Ureter, Transitional Renal Pelvis and Ureter Cancer, Trophoblastic Tumors, Ureter and Renal Pelvis Cell Cancer, Urethral Cancer, Uterine Cancer, Uterine Sarcoma, Vaginal Cancer, Visual Pathway and Hypothalamic Glioma, Vulvar Cancer, Waldenstrom's Macroglobulinemia, Wilms' Tumor, and any other hyperproliferative disease, besides neoplasia, located in an organ system listed above.

[0600] In another preferred embodiment, polynucleotides or polypeptides, or agonists or antagonists of the present invention are used to diagnose, prognose, prevent, and/or treat premalignant conditions and to prevent progression to a neoplastic or malignant state, including but not limited to those disorders described above. Such uses are indicated in conditions known or suspected of preceding progression to neoplasia or cancer, in particular, where non-neoplastic cell growth consisting of hyperplasia, metaplasia, or most particularly, dysplasia has occurred (for review of such abnormal growth conditions, see Robbins and Angell, 1976, Basic Pathology, 2d Ed., W. B. Saunders Co., Philadelphia, pp. 68-79.)

[0601] Hyperplasia is a form of controlled cell proliferation, involving an increase in cell number in a tissue or organ, without significant alteration in structure or function. Hyperplastic disorders which can be diagnosed, prognosed, prevented, and/or treated with compositions of the invention (including polynucleotides, polypeptides, agonists or antagonists) include, but are not limited to, angiofollicular mediastinal lymph node hyperplasia, angiolymphoid hyperplasia with eosinophilia, atypical melanocytic hyperplasia, basal cell hyperplasia, benign giant lymph node hyperplasia, cementum hyperplasia, congenital adrenal hyperplasia, congenital sebaceous hyperplasia, cystic hyperplasia, cystic hyperplasia of the breast, denture hyperplasia, ductal hyperplasia, endometrial hyperplasia, fibromuscular hyperplasia, focal epithelial hyperplasia, gingival hyperplasia, inflammatory fibrous hyperplasia, inflammatory papillary hyperplasia, intravascular papillary endothelial hyperplasia, nodular hyperplasia of prostate, nodular regenerative hyperplasia, pseudoepitheliomatous hyperplasia, senile sebaceous hyperplasia, and verrucous hyperplasia.

[0602] Metaplasia is a form of controlled cell growth in which one type of adult or fully differentiated cell substitutes for another type of adult cell. Metaplastic disorders which can be diagnosed, prognosed, prevented, and/or treated with compositions of the invention (including polynucleotides, polypeptides, agonists or antagonists) include, but are not limited to, agnogenic myeloid metaplasia, apocrine metaplasia, atypical metaplasia, autoparenchymatous metaplasia, connective tissue metaplasia, epithelial metaplasia, intestinal metaplasia, metaplastic anemia, metaplastic ossification, metaplastic polyps, myeloid metaplasia, primary myeloid metaplasia, secondary myeloid metaplasia, squamous metaplasia, squamous metaplasia of amnion, and symptomatic myeloid metaplasia.

[0603] Dysplasia is frequently a forerunner of cancer, and is found mainly in the epithelia; it is the most disorderly form of non-neoplastic cell growth, involving a loss in individual cell uniformity and in the architectural orientation of cells. Dysplastic cells often have abnormally large, deeply stained nuclei, and exhibit pleomorphism. Dysplasia characteristically occurs where there exists chronic irritation or inflammation. Dysplastic disorders which can be diagnosed, prognosed, prevented, and/or treated with compositions of the invention (including polynucleotides, polypeptides, agonists or antagonists) include, but are not limited to, anhidrotic ectodermal dysplasia, anterofacial dysplasia, asphyxiating thoracic dysplasia, atriodigital dysplasia, bronchopulmonary dysplasia, cerebral dysplasia, cervical dysplasia, chondroectodermal dysplasia, cleidocranial dysplasia, congenital ectodermal dysplasia, craniodiaphysial dysplasia, craniocarpotarsal dysplasia, craniometaphysial dysplasia, dentin dysplasia, diaphysial dysplasia, ectodermal dysplasia, enamel dysplasia, encephalo-ophthalmic dysplasia, dysplasia epiphysialis hemimelia, dysplasia epiphysialis multiplex, dysplasia epiphysialis punctata, epithelial dysplasia, faciodigitogenital dysplasia, familial fibrous dysplasia of jaws, familial white folded dysplasia, fibromuscular dysplasia, fibrous dysplasia of bone, florid osseous dysplasia, hereditary renal-retinal dysplasia, hidrotic ectodermal dysplasia, hypohidrotic ectodermal dysplasia, lymphopenic thymic dysplasia, mammary dysplasia, mandibulofacial dysplasia, metaphysial dysplasia, Mondini dysplasia, monostotic fibrous dysplasia, mucoepithelial dysplasia, multiple epiphysial dysplasia, oculoauriculovertebral dysplasia, oculodentodigital dysplasia, oculovertebral dysplasia, odontogenic dysplasia, ophthalmomandibulomelic dysplasia, periapical cemental dysplasia, polyostotic fibrous dysplasia, pseudoachondroplastic spondyloepiphysial dysplasia, retinal dysplasia, septo-optic dysplasia, spondyloepiphysial dysplasia, and ventriculoradial dysplasia.

[0604] Additional pre-neoplastic disorders which can be diagnosed, prognosed, prevented, and/or treated with compositions of the invention (including polynucleotides, polypeptides, agonists or antagonists) include, but are not limited to, benign dysproliferative disorders (e.g., benign tumors, fibrocystic conditions, tissue hypertrophy, intestinal polyps, colon polyps, and esophageal dysplasia), leukoplakia, keratoses, Bowen's disease, Farmer's Skin, solar cheilitis, and solar keratosis.

[0605] In another embodiment, a polypeptide of the invention, or polynucleotides, antibodies, agonists, or antagonists corresponding to that polypeptide, may be used to diagnose and/or prognose disorders associated with the tissue(s) in which the polypeptide of the invention is expressed, including one, two, three, four, five, or more tissues disclosed in Table 1A, 7 (Tissue Distribution Library Code).

[0606] In another embodiment, polynucleotides, polypeptides, antibodies, and/or agonists or antagonists of the present invention conjugated to a toxin or a radioactive isotope, as described herein, may be used to treat cancers and neoplasms, including, but not limited to those described herein. In a further preferred embodiment, polynucleotides, polypeptides, antibodies, and/or agonists or antagonists of the present invention conjugated to a toxin or a radioactive isotope, as described herein, may be used to treat acute myelogenous leukemia.

[0607] Additionally, polynucleotides, polypeptides, and/or agonists or antagonists of the invention may affect apoptosis, and therefore, would be useful in treating a number of diseases associated with increased cell survival or the inhibition of apoptosis. For example, diseases associated with increased cell survival or the inhibition of apoptosis that could be diagnosed, prognosed, prevented, and/or treated by polynucleotides, polypeptides, and/or agonists or antagonists of the invention, include cancers (such as follicular lymphomas, carcinomas with p53 mutations, and hormone-dependent tumors, including, but not limited to colon cancer, cardiac tumors, pancreatic cancer, melanoma, retinoblastoma, glioblastoma, lung cancer, intestinal cancer, testicular cancer, stomach cancer, neuroblastoma, myxoma, myoma, lymphoma, endothelioma, osteoblastoma, osteoclastoma, osteosarcoma, chondrosarcoma, adenoma, breast cancer, prostate cancer, Kaposi's sarcoma and ovarian cancer); autoimmune disorders such as, multiple sclerosis, Sjogren's syndrome, Hashimoto's thyroiditis, biliary cirrhosis, Behçet's disease, Crohn's disease, polymyositis, systemic lupus erythematosus and immune-related glomerulonephritis and rheumatoid arthritis) and viral infections (such as herpes viruses, pox viruses and adenoviruses), inflammation, graft v. host disease, acute graft rejection, and chronic graft rejection.

[0608] In preferred embodiments, polynucleotides, polypeptides, and/or agonists or antagonists of the invention are used to inhibit growth, progression, and/or metastasis of cancers, in particular those listed above.

[0609] Additional diseases or conditions associated with increased cell survival that could be diagnosed, prognosed, prevented, and/or treated by polynucleotides, polypeptides, and/or agonists or antagonists of the invention, include, but are not limited to, progression, and/or metastases of malignancies and related disorders such as leukemia (including acute leukemias (e.g., acute lymphocytic leukemia, acute myelocytic leukemia (including myeloblastic, promyelocytic, myelomonocytic, monocytic, and erythroleukemia)) and chronic leukemias (e.g., chronic myelocytic (granulocytic) leukemia and chronic lymphocytic leukemia)), polycythemia vera, lymphomas (e.g., Hodgkin's disease and non-Hodgkin's disease), multiple myeloma, Waldenstrom's macroglobulinemia, heavy chain disease, and solid tumors including, but not limited to, sarcomas and carcinomas such as fibrosarcoma, myxosarcoma, liposarcoma, chondrosarcoma, osteogenic sarcoma, chordoma, angiosarcoma, endotheliosarcoma, lymphangiosarcoma, lymphangioendotheliosarcoma, synovioma, mesothelioma, Ewing's tumor, leiomyosarcoma, rhabdomyosarcoma, colon carcinoma, pancreatic cancer, breast cancer, ovarian cancer, prostate cancer, squamous cell carcinoma, basal cell carcinoma, adenocarcinoma, sweat gland carcinoma, sebaceous gland carcinoma, papillary carcinoma, papillary adenocarcinomas, cystadenocarcinoma, medullary carcinoma, bronchogenic carcinoma, renal cell carcinoma, hepatoma, bile duct carcinoma, choriocarcinoma, seminoma, embryonal carcinoma, Wilm's tumor, cervical cancer, testicular tumor, lung carcinoma, small cell lung carcinoma, bladder carcinoma, epithelial carcinoma, glioma, astrocytoma, medulloblastoma, craniopharyngioma, ependymoma, pinealoma, emangioblastoma, acoustic neuroma, oligodendroglioma, menangioma, melanoma, neuroblastoma, and retinoblastoma.

[0610] Diseases associated with increased apoptosis that could be diagnosed, prognosed, prevented, and/or treated by polynucleotides, polypeptides, and/or agonists or antagonists of the invention, include AIDS; neurodegenerative disorders (such as Alzheimer's disease, Parkinson's disease, amyotrophic lateral sclerosis, retinitis pigmentosa, cerebellar degeneration and brain tumor or prior associated disease); autoimmune disorders (such as, multiple sclerosis, Sjogren's syndrome, Hashimoto's thyroiditis, biliary cirrhosis, Behçet's disease, Crohn's disease, polymyositis, systemic lupus erythematosus and immune-related glomerulonephritis and rheumatoid arthritis) myelodysplastic syndromes (such as aplastic anemia), graft v. host disease, ischemic injury (such as that caused by myocardial infarction, stroke and reperfusion injury), liver injury (e.g., hepatitis related liver injury, ischemia/reperfusion injury, cholestosis (bile duct injury) and liver cancer); toxin-induced liver disease (such as that caused by alcohol), septic shock, cachexia and anorexia.

[0611] Hyperproliferative diseases and/or disorders that could be diagnosed, prognosed, prevented, and/or treated by polynucleotides, polypeptides, and/or agonists or antagonists of the invention, include, but are not limited to, neoplasms located in the liver, abdomen, bone, breast, digestive system, pancreas, peritoneum, endocrine glands (adrenal, parathyroid, pituitary, testicles, ovary, thymus, thyroid), eye, head and neck, nervous system (central and peripheral), lymphatic system, pelvis, skin, soft tissue, spleen, thorax, and urogenital tract.

[0612] Similarly, other hyperproliferative disorders can also be diagnosed, prognosed, prevented, and/or treated by polynucleotides, polypeptides, and/or agonists or antagonists of the invention. Examples of such hyperproliferative disorders include, but are not limited to: hypergammaglobulinemia, lymphoproliferative disorders, paraproteinemias, purpura, sarcoidosis, Sezary Syndrome, Waldenstron's macroglobulinemia, Gaucher's Disease, histiocytosis, and any other hyperproliferative disease, besides neoplasia, located in an organ system listed above.

[0613] One preferred embodiment utilizes polynucleotides of the present invention to inhibit aberrant cellular division, by gene therapy using the present invention, and/or protein fusions or fragments thereof.

[0614] Thus, the present invention provides a method for treating cell proliferative diseases, disorders, and/or conditions by inserting into an abnormally proliferating cell a polynucleotide of the present invention, wherein said polynucleotide represses said cell proliferation, disease, disorder, and/or condition.

[0615] In a preferred embodiment, the present invention provides a method for treating cell proliferative diseases, disorders and/or conditions of the colorectal cancer by inserting into a cell, a polynucleotide of the present invention, wherein said polynucleotide represses said cell proliferation, disease and/or disorder.

[0616] Another embodiment of the present invention provides a method of treating cell-proliferative diseases, disorders, and/or conditions in individuals comprising administration of one or more active gene copies of the present invention to an abnormally proliferating cell or cells. In a preferred embodiment, polynucleotides of the present invention is a DNA construct comprising a recombinant expression vector effective in expressing a DNA sequence encoding said polynucleotides. In another preferred embodiment of the present invention, the DNA construct encoding the polynucleotides of the present invention is inserted into cells to be treated utilizing a retrovirus, or more preferably an adenoviral vector (see, e.g., G J. Nabel, et. al., PNAS 96: 324-326 (1999), which is hereby incorporated by reference). In a most preferred embodiment, the viral vector is defective and will not transform non-proliferating cells, only proliferating cells. Moreover, in a preferred embodiment, the polynucleotides of the present invention inserted into proliferating cells either alone, or in combination with or fused to other polynucleotides, can then be modulated via an external stimulus (i.e., magnetic, specific small molecule, chemical, or drug administration, etc.), which acts upon the promoter upstream of said polynucleotides to induce expression of the encoded protein product. As such the beneficial therapeutic affect of the present invention may be expressly modulated (i.e., to increase, decrease, or inhibit expression of the present invention) based upon said external stimulus.

[0617] Polynucleotides of the present invention may be useful in repressing expression of oncogenic genes or antigens. By “repressing expression of the oncogenic genes ” is intended the suppression of the transcription of the gene, the degradation of the gene transcript (pre-message RNA), the inhibition of splicing, the destruction of the messenger RNA, the prevention of the post-translational modifications of the protein, the destruction of the protein, or the inhibition of the normal function of the protein.

[0618] For local administration to abnormally proliferating cells, polynucleotides of the present invention may be administered by any method known to those of skill in the art including, but not limited to transfection, electroporation, microinjection of cells, or in vehicles such as liposomes, lipofectin, or as naked polynucleotides, or any other method described throughout the specification. The polynucleotide of the present invention may be delivered by known gene delivery systems such as, but not limited to, retroviral vectors (Gilboa, J. Virology 44:845 (1982); Hocke, Nature 320:275 (1986); Wilson, et al., Proc. Natl. Acad. Sci. U.S.A. 85:3014), vaccinia virus system (Chakrabarty et al., Mol. Cell Biol. 5:3403 (1985) or other efficient DNA delivery systems (Yates et al., Nature 313:812 (1985)) known to those skilled in the art. These references are exemplary only and are hereby incorporated by reference. In order to specifically deliver or transfect cells which are abnormally proliferating and spare non-dividing cells, it is preferable to utilize a retrovirus, or adenoviral (as described in the art and elsewhere herein) delivery system known to those of skill in the art. Since host DNA replication is required for retroviral DNA to integrate and the retrovirus will be unable to self replicate due to the lack of the retrovirus genes needed for its life cycle. Utilizing such a retroviral delivery system for polynucleotides of the present invention will target said gene and constructs to abnormally proliferating cells and will spare the non-dividing normal cells.

[0619] The polynucleotides of the present invention may be delivered directly to cell proliferative disorder/disease sites in internal organs, body cavities and the like by use of imaging devices used to guide an injecting needle directly to the disease site. The polynucleotides of the present invention may also be administered to disease sites at the time of surgical intervention.

[0620] By “cell proliferative disease” is meant any human or animal disease or disorder, affecting any one or any combination of organs, cavities, or body parts, which is characterized by single or multiple local abnormal proliferations of cells, groups of cells, or tissues, whether benign or malignant.

[0621] Any amount of the polynucleotides of the present invention may be administered as long as it has a biologically inhibiting effect on the proliferation of the treated cells. Moreover, it is possible to administer more than one of the polynucleotide of the present invention simultaneously to the same site. By “biologically inhibiting” is meant partial or total growth inhibition as well as decreases in the rate of proliferation or growth of the cells. The biologically inhibitory dose may be determined by assessing the effects of the polynucleotides of the present invention on target malignant or abnormally proliferating cell growth in tissue culture, tumor growth in animals and cell cultures, or any other method known to one of ordinary skill in the art.

[0622] The present invention is further directed to antibody-based therapies which involve administering of anti-polypeptides and anti-polynucleotide antibodies to a mammalian, preferably human, patient for treating one or more of the described diseases, disorders, and/or conditions. Methods for producing anti-polypeptides and anti-polynucleotide antibodies polyclonal and monoclonal antibodies are described in detail elsewhere herein. Such antibodies may be provided in pharmaceutically acceptable compositions as known in the art or as described herein.

[0623] A summary of the ways in which the antibodies of the present invention may be used therapeutically includes binding polynucleotides or polypeptides of the present invention locally or systemically in the body or by direct cytotoxicity of the antibody, e.g., as mediated by complement (CDC) or by effector cells (ADCC). Some of these approaches are described in more detail below. Armed with the teachings provided herein, one of ordinary skill in the art will know how to use the antibodies of the present invention for diagnostic, monitoring or therapeutic purposes without undue experimentation.

[0624] In particular, the antibodies, fragments and derivatives of the present invention are useful for treating a subject having or developing cell proliferative and/or differentiation diseases, disorders, and/or conditions as described herein. Such treatment comprises administering a single or multiple doses of the antibody, or a fragment, derivative, or a conjugate thereof.

[0625] The antibodies of this invention may be advantageously utilized in combination with other monoclonal or chimeric antibodies, or with lymphokines or hematopoietic growth factors, for example, which serve to increase the number or activity of effector cells which interact with the antibodies.

[0626] It is preferred to use high affinity and/or potent in vivo inhibiting and/or neutralizing antibodies against polypeptides or polynucleotides of the present invention, fragments or regions thereof, for both immunoassays directed to and therapy of diseases, disorders, and/or conditions related to polynucleotides or polypeptides, including fragments thereof, of the present invention. Such antibodies, fragments, or regions, will preferably have an affinity for polynucleotides or polypeptides, including fragments thereof. Preferred binding affinities include those with a dissociation constant or Kd less than 5×10⁻⁶M, 10⁻⁶M, 5×10⁻⁷M, 10⁻⁷M, 5×10⁻⁸M, 10⁻⁸M, 5×10⁻⁹M, 10⁻⁹M, 5×10⁻¹⁰M, 10⁻¹⁰M, 5×10⁻¹¹M, 10⁻¹¹M, 5×10⁻¹²M, 10⁻¹²M, 5×10⁻³M, 10⁻³M, 5×10⁻¹⁴M, 10⁻¹⁴M, 5×10⁻¹⁵M, and 10⁻¹⁵M.

[0627] Moreover, colorectal cancer antigen polypeptides of the present invention or fragments thereof, are useful in inhibiting the angiogenesis of proliferative cells or tissues, either alone, as a protein fusion, or in combination with other polypeptides directly or indirectly, as described elsewhere herein. In a most preferred embodiment, said anti-angiogenesis effect may be achieved indirectly, for example, through the inhibition of hematopoietic, tumor-specific cells, such as tumor-associated macrophages (see, e.g., Joseph IB, et al. J Natl Cancer Inst, 90(21):1648-53 (1998), which is hereby incorporated by reference). Antibodies directed to polypeptides or polynucleotides of the present invention may also result in inhibition of angiogenesis directly, or indirectly (see, e.g., Witte L, et al., Cancer Metastasis Rev. 17(2):155-61 (1998), which is hereby incorporated by reference)).

[0628] Polypeptides, including protein fusions, of the present invention, or fragments thereof may be useful in inhibiting proliferative cells or tissues through the induction of apoptosis. Said polypeptides may act either directly, or indirectly to induce apoptosis of proliferative cells and tissues, for example in the activation of a death-domain receptor, such as tumor necrosis factor (TNF) receptor-1, CD95 (Fas/APO-1), TNF-receptor-related apoptosis-mediated protein (TRAMP) and TNF-related apoptosis-inducing ligand (TRAIL) receptor-1 and -2 (see, e.g., Schulze-Osthoff K, et.al., Eur J Biochem 254(3):439-59 (1998), which is hereby incorporated by reference). Moreover, in another preferred embodiment of the present invention, said polypeptides may induce apoptosis through other mechanisms, such as in the activation of other proteins which will activate apoptosis, or through stimulating the expression of said proteins, either alone or in combination with small molecule drugs or adjuvants, such as apoptonin, galectins, thioredoxins, antiinflammatory proteins (See for example, Mutat. Res. 400(1-2):447-55 (1998), Med Hypotheses.50(5):423-33 (1998), Chem. Biol. Interact. Apr 24;111-112:23-34 (1998), J. Mo. Med. 76(6):402-12 (1998), Int. J. Tissue React. 20(1):3-15 (1998), which are all hereby incorporated by reference).

[0629] Polypeptides, including protein fusions to, or fragments thereof, of the present invention are useful in inhibiting the metastasis of proliferative cells or tissues. Inhibition may occur as a direct result of administering polypeptides, or antibodies directed to said polypeptides as described elsewhere herein, or indirectly, such as activating the expression of proteins known to inhibit metastasis, for example alpha 4 integrins, (See, e.g., Curr Top Microbiol Immunol 1998;231:125-41, which is hereby incorporated by reference). Such therapeutic affects of the present invention may be achieved either alone, or in combination with small molecule drugs or adjuvants.

[0630] In another embodiment, the invention provides a method of delivering compositions containing the polypeptides of the invention (e.g., compositions containing polypeptides or anti-colorectal cancer antigen polypeptide antibodies associated with heterologous polypeptides, heterologous nucleic acids, toxins, or prodrugs) to targeted cells expressing the polypeptide of the present invention. Colorectal cancer antigen polypeptides or anti-colorectal cancer antigen polypeptide antibodies of the invention may be associated with heterologous polypeptides, heterologous nucleic acids, toxins, or prodrugs via hydrophobic, hydrophilic, ionic and/or covalent interactions.

[0631] Polypeptides, protein fusions to, or fragments thereof, of the present invention are useful in enhancing the immunogenicity and/or antigenicity of proliferating cells or tissues, either directly, such as would occur if the polypeptides of the present invention ‘vaccinated’ the immune response to respond to proliferative antigens and immunogens, or indirectly, such as in activating the expression of proteins known to enhance the immune response (e.g. chemokines), to said antigens and immunogens.

[0632] Urinary System Disorders

[0633] Polynucleotides, polypeptides, antibodies, and/or agonists or antagonists of the present invention, may be used to treat, prevent, diagnose, and/or prognose disorders of the urinary system, including but not limited to disorders of the renal system, bladder, ureters, and urethra. Renal disorders include, but are not limited to, kidney failure, nephritis, blood vessel disorders of kidney, metabolic and congenital kidney disorders, urinary disorders of the kidney, autoimmune disorders, sclerosis and necrosis, electrolyte imbalance, and kidney cancers.

[0634] Kidney failure diseases include, but are not limited to, acute kidney failure, chronic kidney failure, atheroembolic renal failure, and end-stage renal disease. Inflammatory diseases of the kidney include acute glomerulonephritis, postinfectious glomerulonephritis, rapidly progressive glomerulonephritis, nephrotic syndrome, membranous glomerulonephritis, familial nephrotic syndrome, membranoproliferative glomerulonephritis I and II, mesangial proliferative glomerulonephritis, chronic glomerulonephritis, acute tubulointerstitial nephritis, chronic tubulointerstitial nephritis, acute post-streptococcal glomerulonephritis (PSGN), pyelonephritis, lupus nephritis, chronic nephritis, interstitial nephritis, and post-streptococcal glomerulonephritis.

[0635] Blood vessel disorders of the kidneys include, but are not limited to, kidney infarction, atheroembolic kidney disease, cortical necrosis, malignant nephrosclerosis, renal vein thrombosis, renal underperfusion, renal ischemia-reperfusion, renal artery embolism, and renal artery stenosis. Kidney disorders resulting form urinary tract problems include, but are not limited to, pyelonephritis, hydronephrosis, urolithiasis (renal lithiasis, nephrolithiasis), reflux nephropathy, urinary tract infections, urinary retention, and acute or chronic unilateral obstructive uropathy.

[0636] Metabolic and congenital disorders of the kidneys include, but are not limited to, renal tubular acidosis, renal glycosuria, nephrogenic diabetes insipidus, cystinuria, Fanconi's syndrome, vitamin D-resistant rickets, Hartnup disease, Bartter's syndrome, Liddle's syndrome, polycystic kidney disease, medullary cystic disease, medullary sponge kidney, Alport's syndrome, nail-patella syndrome, congenital nephrotic syndrome, CRUSH syndrome, horseshoe kidney, diabetic nephropathy, nephrogenic diabetes insipidus, analgesic nephropathy, kidney stones, and membranous nephropathy, Kidney disorders resulting from an autoimmune response include, but are not limited to, systemic lupus erythematosus (SLE), Goodpasture syndrome, IgA nephropathy, and IgM mesangial proliferative glomerulonephritis.

[0637] Sclerotic or necrotic disorders of the kidney include, but are not limited to, glomerulosclerosis, diabetic nephropathy, focal segmental glomerulosclerosis (FSGS), necrotizing glomerulonephritis, and renal papillary necrosis. Kidneys may also develop carcinomas, including, but not limited to, hypemephroma, nephroblastoma, renal cell cancer, transitional cell cancer, squamous cell cancer, and Wilm's tumor.

[0638] Kidney disorders may also result in electrolyte imbalances, including, but not limited to, nephrocalcinosis, pyuria, edema, hydronephritis, proteinuria, hyponatremia, hypernatremia, hypokalemia, hyperkalemia, hypocalcemia, hypercalcemia, hypophosphatemia, and hyperphosphatemia.

[0639] Bladder disorders include, but are not limited to, benign prostatic hyperplasia (BPH), interstitial cystitis (IC), prostatitis, proteinuria, urinary tract infections, urinary incontinence, urinary retention. Disorders of the ureters and urethra include, but are not limited to, acute or chronic unilateral obstructive uropathy. The bladder, ureters, and urethra may also develop carcinomas, including, but not limited to, superficial bladder canccer, invasive bladder cancer, carcinoma of the ureter, and urethra cancers.

[0640] Polypeptides may be administered using any method known in the art, including, but not limited to, direct needle injection at the delivery site, intravenous injection, topical administration, catheter infusion, biolistic injectors, particle accelerators, gelfoam sponge depots, other commercially available depot materials, osmotic pumps, oral or suppositorial solid pharmaceutical formulations, decanting or topical applications during surgery, aerosol delivery. Such methods are known in the art. Polypeptides may be administered as part of a Therapeutic, described in more detail below. Methods of delivering polynucleotides are described in more detail herein.

[0641] Cardiovascular Disorders

[0642] Polynucleotides or polypeptides, or agonists or antagonists of the present invention, may be used to treat, prevent, diagnose, and/or prognose cardiovascular disorders, including, but not limited to, peripheral artery disease, such as limb ischemia.

[0643] Cardiovascular disorders include cardiovascular abnormalities, such as arterio-arterial fistula, arteriovenous fistula, cerebral arteriovenous malformations, congenital heart defects, pulmonary atresia, and Scimitar Syndrome. Congenital heart defects include aortic coarctation, cor triatriatum, coronary vessel anomalies, crisscross heart, dextrocardia, patent ductus arteriosus, Ebstein's anomaly, Eisenmenger complex, hypoplastic left heart syndrome, levocardia, tetralogy of fallot, transposition of great vessels, double outlet right ventricle, tricuspid atresia, persistent truncus arteriosus, total anomalous pulmonary venous connection, hypoplastic left heart syndrome, and heart septal defects, such as aortopulmonary septal defect, endocardial cushion defects, Lutembacher's Syndrome, atrioventricular canal defect, trilogy of Fallot, ventricular heart septal defects.

[0644] Cardiovascular disorders also include heart disease, such as arrhythmias, carcinoid heart disease, high cardiac output, low cardiac output, cardiac tamponade, endocarditis (including bacterial), heart aneurysm, cardiac arrest, sudden cardiac death, congestive heart failure, congestive cardiomyopathy, paroxysmal dyspnea, cardiac edema, heart hypertrophy, congestive cardiomyopathy, left ventricular hypertrophy, right ventricular hypertrophy, post-infarction heart rupture, ventricular septal rupture, heart valve diseases, myocardial diseases, myocardial ischemia, pericardial effusion, pericarditis (including constrictive and tuberculous), pneumopericardium, postpericardiotomy syndrome, pulmonary heart disease, rheumatic heart disease, ventricular dysfunction, hyperemia, cardiovascular pregnancy complications, Scimitar Syndrome, diastolic dysfunction, enlarged heart, heart block, J-curve phenomenon, rheumatic heart disease, Marfan syndrome, cardiovascular syphilis, and cardiovascular tuberculosis.

[0645] Arrhythmias include sinus arrhythmia, atrial fibrillation, atrial flutter, bradycardia, extrasystole, Adams-Stokes Syndrome, bundle-branch block, sinoatrial block, long QT syndrome, parasystole, Lown-Ganong-Levine Syndrome, Mahaim-type pre-excitation syndrome, Wolff-Parkinson-White syndrome, sick sinus syndrome, tachycardias, and ventricular fibrillation. Tachycardias include paroxysmal tachycardia, supraventricular tachycardia, accelerated idioventricular rhythm, atrioventricular nodal reentry tachycardia, ectopic atrial tachycardia, ectopic junctional tachycardia, sinoatrial nodal reentry tachycardia, sinus tachycardia, Torsades de Pointes, and ventricular tachycardia.

[0646] Heart valve disease include aortic valve insufficiency, aortic valve stenosis, heart murmurs, aortic valve prolapse, mitral valve prolapse, tricuspid valve prolapse, mitral valve insufficiency, mitral valve stenosis, pulmonary atresia, pulmonary valve insufficiency, pulmonary valve stenosis, tricuspid atresia, tricuspid valve insufficiency, tricuspid valve stenosis, and bicuspid aortic valve.

[0647] Myocardial diseases include alcoholic cardiomyopathy, congestive cardiomyopathy, hypertrophic cardiomyopathy, aortic subvalvular stenosis, pulmonary subvalvular stenosis, restrictive cardiomyopathy, Chagas cardiomyopathy, endocardial fibroelastosis, endomyocardial fibrosis, Kearns Syndrome, Barth syndrome, myocardial reperfusion injury, and myocarditis.

[0648] Myocardial ischemias include coronary disease, such as angina pectoris, Prinzmetal's angina, unstable angina, coronary aneurysm, coronary arteriosclerosis, coronary thrombosis, coronary vasospasm, myocardial infarction and myocardial stunning.

[0649] Cardiovascular diseases also include vascular diseases such as aneurysms, angiodysplasia, angiomatosis, bacillary angiomatosis, Hippel-Lindau Disease, Klippel-Trenaunay-Weber Syndrome, Sturge-Weber Syndrome, angioneurotic edema, aortic diseases, Takayasu's Arteritis, aortitis, Leriche's Syndrome, arterial occlusive diseases, arteritis, enarteritis, polyarteritis nodosa, cerebrovascular disorders, diabetic angiopathies, diabetic retinopathy, embolisms, thrombosis, erythromelalgia, hemorrhoids, hepatic veno-occlusive disease, hypertension, hypotension (shock), ischemia, peripheral vascular diseases, phlebitis, superficial phlebitis, pulmonary veno-occlusive disease, chronic obstructive pulmonary disease, Buerger's disease, Raynaud's disease, CREST syndrome, retinal vein occlusion, Scimitar syndrome, superior vena cava syndrome, telangiectasia, atacia telangiectasia, hereditary hemorrhagic telangiectasia, deep vein thrombosis, varicocele, varicose veins, varicose ulcer, vasculitis, and venous insufficiency.

[0650] Aneurysms include dissecting aneurysms, false aneurysms, infected aneurysms, ruptured aneurysms, aortic aneurysms, cerebral aneurysms, coronary aneurysms, heart aneurysms, and iliac aneurysms.

[0651] Arterial occlusive diseases include arteriosclerosis, arteriolosclerosis, atherosclerosis, intermittent claudication, carotid stenosis, fibromuscular dysplasias, mesenteric vascular occlusion, Moyamoya disease, renal artery obstruction, retinal artery occlusion, and thromboangiitis obliterans.

[0652] Cerebrovascular disorders include carotid artery diseases, cerebral amyloid angiopathy, cerebral aneurysm, cerebral anoxia, cerebral arteriosclerosis, cerebral arteriovenous malformation, cerebral artery diseases, cerebral embolism and thrombosis, carotid artery thrombosis, sinus thrombosis, Wallenberg's syndrome, cerebral hemorrhage, epidural hematoma, subdural hematoma, subaraxhnoid hemorrhage, cerebral infarction, cerebral ischemia (including transient), subclavian steal syndrome, periventricular leukomalacia, vascular headache, cluster headache, migraine, and vertebrobasilar insufficiency.

[0653] Embolisms include air embolisms, amniotic fluid embolisms, cholesterol embolisms, blue toe syndrome, fat embolisms, pulmonary embolisms, and thromoboembolisms. Thrombosis include coronary thrombosis, hepatic vein thrombosis, deep vein thrombosis, retinal vein occlusion, carotid artery thrombosis, sinus thrombosis, Wallenberg's syndrome, and thrombophlebitis.

[0654] Ischemia includes cerebral ischemia, ischemic colitis, silent ischemia, compartment syndromes, anterior compartment syndrome, myocardial ischemia, reperfusion injuries, and peripheral limb ischemia. Vasculitis includes aortitis, arteritis, Behçet's Syndrome, Churg-Strauss Syndrome, mucocutaneous lymph node syndrome, thromboangiitis obliterans, hypersensitivity vasculitis, Schoenlein-Henoch purpura, allergic cutaneous vasculitis, and Wegener's granulomatosis.

[0655] Cardiovascular diseases can also occur due to electrolyte imbalances that include, but are not limited to hyponatremia, hypernatremia, hypokalemia, hyperkalemia, hypocalcemia, hypercalcemia, hypophosphatemia, and hyperphophatemia. Neoplasm and/or cancers of the cardiovascular system include, but are not limited to, myxomas, fibromas, and rhabdomyomas.

[0656] Polypeptides may be administered using any method known in the art, including, but not limited to, direct needle injection at the delivery site, intravenous injection, topical administration, catheter infusion, biolistic injectors, particle accelerators, gelfoam sponge depots, other commercially available depot materials, osmotic pumps, oral or suppositorial solid pharmaceutical formulations, decanting or topical applications during surgery, aerosol delivery. Such methods are known in the art. Polypeptides may be administered as part of a Therapeutic, described in more detail below. Methods of delivering polynucleotides are described in more detail herein.

[0657] Respiratory Disorders

[0658] Polynucleotides or polypeptides, or agonists or antagonists of the present invention may be used to treat, prevent, diagnose, and/or prognose diseases and/or disorders of the respiratory system.

[0659] Diseases and disorders of the respiratory system include, but are not limited to, nasal vestibulitis, nonallergic rhinitis (e.g., acute rhinitis, chronic rhinitis, atrophic rhinitis, vasomotor rhinitis), nasal polyps, and sinusitis, juvenile angiofibromas, cancer of the nose and juvenile papillomas, vocal cord polyps, nodules (singer's nodules), contact ulcers, vocal cord paralysis, laryngoceles, pharyngitis (e.g., viral and bacterial), tonsillitis, tonsillar cellulitis, parapharyngeal abscess, laryngitis, laryngoceles, and throat cancers (e.g., cancer of the nasopharynx, tonsil cancer, larynx cancer), lung cancer (e.g., squamous cell carcinoma, small cell (oat cell) carcinoma, large cell carcinoma, and adenocarcinoma), allergic disorders (eosinophilic Ipneumonia, hypersensitivity pneumonitis (e.g., extrinsic allergic alveolitis, allergic interstitial pneumonitis, organic dust pneumoconiosis, allergic bronchopulmonary aspergillosis, asthma, Wegener's granulomatosis (granulomatous vasculitis), Goodpasture's syndrome)), pneumonia (e.g., bacterial pneumonia (e.g., Streptococcus pneumoniae (pneumoncoccal pneumonia), Staphylococcus aureus (staphylococcal pneumonia), Gram-negative bacterial pneumonia (caused by, e.g., Klebsiella and Pseudomas spp.), Mycoplasma pneumoniae pneumonia, Hemophilus influenzae pneumonia, Legionella pneumophila (Legionnaires' disease), and Chlamydia psittaci (Psittacosis)), and viral pneumonia (e.g., influenza, chickenpox (varicella).

[0660] Additional diseases and disorders of the respiratory system include, but are not limited to bronchiolitis, polio (poliomyelitis), croup, respiratory syncytial viral infection, mumps, erythema infectiosum (fifth disease), roseola infantum, progressive rubella panencephalitis, german measles, and subacute sclerosing panencephalitis), fungal pneumonia (e.g., Histoplasmosis, Coccidioidomycosis, Blastomycosis, fungal infections in people with severely suppressed immune systems (e.g., cryptococcosis, caused by Cryptococcus neoformans; aspergillosis, caused by Aspergillus spp.; candidiasis, caused by Candida; and mucormycosis)), Pneumocystis carinii (pneumocystis pneumonia), atypical pneumonias (e.g., Mycoplasma and Chlamydia spp.), opportunistic infection pneumonia, nosocomial pneumonia, chemical pneumonitis, and aspiration pneumonia, pleural disorders (e.g., pleurisy, pleural effusion, and pneumothorax (e.g., simple spontaneous pneumothorax, complicated spontaneous pneumothorax, tension pneumothorax)), obstructive airway diseases (e.g., asthma, chronic obstructive pulmonary disease (COPD), emphysema, chronic or acute bronchitis), occupational lung diseases (e.g., silicosis, black lung (coal workers' pneumoconiosis), asbestosis, berylliosis, occupational asthsma, byssinosis, and benign pneumoconioses), Infiltrative Lung Disease (e.g., pulmonary fibrosis (e.g., fibrosing alveolitis, usual interstitial pneumonia), idiopathic pulmonary fibrosis, desquamative interstitial pneumonia, lymphoid interstitial pneumonia, histiocytosis X (e.g., Letterer-Siwe disease, Hand-Schüller-Christian disease, eosinophilic granuloma), idiopathic pulmonary hemosiderosis, sarcoidosis and pulmonary alveolar proteinosis), Acute respiratory distress syndrome (also called, e.g., adult respiratory distress syndrome), edema, pulmonary embolism, bronchitis (e.g., viral, bacterial), bronchiectasis, atelectasis, lung abscess (caused by, e.g., Staphylococcus aureus or Legionella pneumophila), and cystic fibrosis.

[0661] Anti-angiogenesis Activity

[0662] The naturally occurring balance between endogenous stimulators and inhibitors of angiogenesis is one in which inhibitory influences predominate. Rastinejad et al., Cell 56:345-355 (1989). In those rare instances in which neovascularization occurs under normal physiological conditions, such as wound healing, organ regeneration, embryonic development, and female reproductive processes, angiogenesis is stringently regulated and spatially and temporally delimited. Under conditions of pathological angiogenesis such as that characterizing solid tumor growth, these regulatory controls fail. Unregulated angiogenesis becomes pathologic and sustains progression of many neoplastic and non-neoplastic diseases. A number of serious diseases are dominated by abnormal neovascularization including solid tumor growth and metastases, arthritis, some types of eye disorders, and psoriasis. See, e.g., reviews by Moses et al., Biotech. 9:630-634 (1991); Folkman et al., N. Engl. J Med., 333:1757-1763 (1995); Auerbach et al., J. Microvasc. Res. 29:401-411 (1985); Folkman, Advances in Cancer Research, eds. Klein and Weinhouse, Academic Press, New York, pp. 175-203 (1985); Patz, Am. J. Opthalmol. 94:715-743 (1982); and Folkman et al., Science 221:719-725 (1983). In a number of pathological conditions, the process of angiogenesis contributes to the disease state. For example, significant data have accumulated which suggest that the growth of solid tumors is dependent on angiogenesis. Folkman and Klagsbrun, Science 235:442-447 (1987).

[0663] The present invention provides for treatment of diseases or disorders associated with neovascularization by administration of the polynucleotides and/or polypeptides of the invention, as well as agonists or antagonists of the present invention. Malignant and metastatic conditions which can be treated with the polynucleotides and polypeptides, or agonists or antagonists of the invention include, but are not limited to, malignancies, solid tumors, and cancers described herein and otherwise known in the art (for a review of such disorders, see Fishman et al., Medicine, 2d Ed., J. B. Lippincott Co., Philadelphia (1985)). Thus, the present invention provides a method of treating an angiogenesis-related disease and/or disorder, comprising administration to an individual in need thereof a therapeutically effective amount of a polynucleotide, polypeptide, antagonist and/or agonist of the invention. For example, polynucleotides, polypeptides, antagonists and/or agonists may be utilized in a variety of additional methods in order to therapeutically treat a cancer or tumor. Cancers which may be treated with polynucleotides, polypeptides, antagonists and/or agonists include, but are not limited to solid tumors, including prostate, lung, breast, ovarian, stomach, pancreas, larynx, esophagus, testes, liver, parotid, biliary tract, colon, rectum, cervix, uterus, endometrium, kidney, bladder, thyroid cancer; primary tumors and metastases; melanomas; glioblastoma; Kaposi's sarcoma; leiomyosarcoma; non-small cell lung cancer; colorectal cancer; advanced malignancies; and blood born tumors such as leukemias. For example, polynucleotides, polypeptides, antagonists and/or agonists may be delivered topically, in order to treat cancers such as skin cancer, head and neck tumors, breast tumors, and Kaposi's sarcoma.

[0664] Within yet other aspects, polynucleotides, polypeptides, antagonists and/or agonists may be utilized to treat superficial forms of bladder cancer by, for example, intravesical administration. Polynucleotides, polypeptides, antagonists and/or agonists may be delivered directly into the tumor, or near the tumor site, via injection or a catheter. Of course, as the artisan of ordinary skill will appreciate, the appropriate mode of administration will vary according to the cancer to be treated. Other modes of delivery are discussed herein.

[0665] Polynucleotides, polypeptides, antagonists and/or agonists may be useful in treating other disorders, besides cancers, which involve angiogenesis. These disorders include, but are not limited to: benign tumors, for example hemangiomas, acoustic neuromas, neurofibromas, trachomas, and pyogenic granulomas; artheroscleric plaques; ocular angiogenic diseases, for example, diabetic retinopathy, retinopathy of prematurity, macular degeneration, corneal graft rejection, neovascular glaucoma, retrolental fibroplasia, rubeosis, retinoblastoma, uvietis and Pterygia (abnormal blood vessel growth) of the eye; rheumatoid arthritis; psoriasis; delayed wound healing; endometriosis; vasculogenesis; granulations; hypertrophic scars (keloids); nonunion fractures; scleroderma; trachoma; vascular adhesions; myocardial angiogenesis; coronary collaterals; cerebral collaterals; arteriovenous malformations; ischemic limb angiogenesis; Osler-Webber Syndrome; plaque neovascularization; telangiectasia; hemophiliac joints; angiofibroma; fibromuscular dysplasia; wound granulation; Crohn's disease; and atherosclerosis.

[0666] For example, within one aspect of the present invention methods are provided for treating hypertrophic scars and keloids, comprising the step of administering a polynucleotide, polypeptide, antagonist and/or agonist of the invention to a hypertrophic scar or keloid.

[0667] Within one embodiment of the present invention polynucleotides, polypeptides, antagonists and/or agonists of the invention are directly injected into a hypertrophic scar or keloid, in order to prevent the progression of these lesions. This therapy is of particular value in the prophylactic treatment of conditions which are known to result in the development of hypertrophic scars and keloids (e.g., bums), and is preferably initiated after the proliferative phase has had time to progress (approximately 14 days after the initial injury), but before hypertrophic scar or keloid development. As noted above, the present invention also provides methods for treating neovascular diseases of the eye, including for example, corneal neovascularization, neovascular glaucoma, proliferative diabetic retinopathy, retrolental fibroplasia and macular degeneration.

[0668] Moreover, ocular disorders associated with neovascularization which can be treated with the polynucleotides and polypeptides of the present invention (including agonists and/or antagonists) include, but are not limited to: neovascular glaucoma, diabetic retinopathy, retinoblastoma, retrolental fibroplasia, uveitis, retinopathy of prematurity macular degeneration, corneal graft neovascularization, as well as other eye inflammatory diseases, ocular tumors and diseases associated with choroidal or iris neovascularization. See, e.g., reviews by Waltman et al, Am. J. Ophthal. 85:704-710 (1978) and Gartner et al., Surv. Ophthal. 22:291-312 (1978).

[0669] Thus, within one aspect of the present invention methods are provided for treating neovascular diseases of the eye such as corneal neovascularization (including corneal graft neovascularization), comprising the step of administering to a patient a therapeutically effective amount of a compound (as described above) to the cornea, such that the formation of blood vessels is inhibited. Briefly, the cornea is a tissue, which normally lacks blood vessels. In certain pathological conditions however, capillaries may extend into the cornea from the pericorneal vascular plexus of the limbus. When the cornea becomes vascularized, it also becomes clouded, resulting in a decline in the patient's visual acuity. Visual loss may become complete if the cornea completely opacitates. A wide variety of disorders can result in corneal neovascularization, including for example, corneal infections (e.g., trachoma, herpes simplex keratitis, leishmaniasis and onchocerciasis), immunological processes (e.g., graft rejection and Stevens-Johnson's syndrome), alkali burns, trauma, inflammation (of any cause), toxic and nutritional deficiency states, and as a complication of wearing contact lenses.

[0670] Within particularly preferred embodiments of the invention, may be prepared for topical administration in saline (combined with any of the preservatives and antimicrobial agents commonly used in ocular preparations), and administered in eyedrop form. The solution or suspension may be prepared in its pure form and administered several times daily. Alternatively, anti-angiogenic compositions, prepared as described above, may also be administered directly to the cornea. Within preferred embodiments, the anti-angiogenic composition is prepared with a muco-adhesive polymer, which binds to cornea. Within further embodiments, the anti-angiogenic factors or anti-angiogenic compositions may be utilized as an adjunct to conventional steroid therapy. Topical therapy may also be useful prophylactically in corneal lesions which are known to have a high probability of inducing an angiogenic response (such as chemical burns). In these instances the treatment, likely in combination with steroids, may be instituted immediately to help prevent subsequent complications.

[0671] Within other embodiments, the compounds described above may be injected directly into the corneal stroma by an ophthalmologist under microscopic guidance. The preferred site of injection may vary with the morphology of the individual lesion, but the goal of the administration would be to place the composition at the advancing front of the vasculature (i.e., interspersed between the blood vessels and the normal cornea). In most cases this would involve perilimbic corneal injection to “protect” the cornea from the advancing blood vessels. This method may also be utilized shortly after a corneal insult in order to prophylactically prevent corneal neovascularization. In this situation, the material could be injected in the perilimbic cornea interspersed between the corneal lesion and its undesired potential limbic blood supply. Such methods may also be utilized in a similar fashion to prevent capillary invasion of transplanted corneas. In a sustained-release form, injections might only be required 2-3 times per year. A steroid could also be added to the injection solution to reduce inflammation resulting from the injection itself.

[0672] Within another aspect of the present invention, methods are provided for treating neovascular glaucoma, comprising the step of administering to a patient a therapeutically effective amount of a polynucleotide, polypeptide, antagonist and/or agonist to the eye, such that the formation of blood vessels is inhibited. In one embodiment, the compound may be administered topically to the eye in order to treat early forms of neovascular glaucoma. Within other embodiments, the compound may be implanted by injection into the region of the anterior chamber angle. Within other embodiments, the compound may also be placed in any location such that the compound is continuously released into the aqueous humor. Within another aspect of the present invention, methods are provided for treating proliferative diabetic retinopathy, comprising the step of administering to a patient a therapeutically effective amount of a polynucleotide, polypeptide, antagonist and/or agonist to the eyes, such that the formation of blood vessels is inhibited.

[0673] Within particularly preferred embodiments of the invention, proliferative diabetic retinopathy may be treated by injection into the aqueous humor or the vitreous, in order to increase the local concentration of the polynucleotide, polypeptide, antagonist and/or agonist in the retina. Preferably, this treatment should be initiated prior to the acquisition of severe disease requiring photocoagulation.

[0674] Within another aspect of the present invention, methods are provided for treating retrolental fibroplasia, comprising the step of administering to a patient a therapeutically effective amount of a polynucleotide, polypeptide, antagonist and/or agonist to the eye, such that the formation of blood vessels is inhibited. The compound may be administered topically, via intravitreous injection and/or via intraocular implants.

[0675] Additionally, disorders which can be treated with the polynucleotides, polypeptides, agonists and/or agonists include, but are not limited to, hemangioma, arthritis, psoriasis, angiofibroma, atherosclerotic plaques, delayed wound healing, granulations, hemophilic joints, hypertrophic scars, nonunion fractures, Osler-Weber syndrome, pyogenic granuloma, scleroderma, trachoma, and vascular adhesions.

[0676] Moreover, disorders and/or states, which can be treated, prevented, diagnosed and/or prognosed with the polynucleotides, polypeptides, agonists and/or agonists of the invention include, but are not limited to, solid tumors, blood born tumors such as leukemias, tumor metastasis, Kaposi's sarcoma, benign tumors, for example hemangiomas, acoustic neuromas, neurofibromas, trachomas, and pyogenic granulomas, rheumatoid arthritis, psoriasis, ocular angiogenic diseases, for example, diabetic retinopathy, retinopathy of prematurity, macular degeneration, corneal graft rejection, neovascular glaucoma, retrolental fibroplasia, rubeosis, retinoblastoma, and uvietis, delayed wound healing, endometriosis, vascluogenesis, granulations, hypertrophic scars (keloids), nonunion fractures, scleroderma, trachoma, vascular adhesions, myocardial angiogenesis, coronary collaterals, cerebral collaterals, arteriovenous malformations, ischemic limb angiogenesis, Osler-Webber Syndrome, plaque neovascularization, telangiectasia, hemophiliac joints, angiofibroma fibromuscular dysplasia, wound granulation, Crohn's disease, atherosclerosis, birth control agent by preventing vascularization required for embryo implantation controlling menstruation, diseases that have angiogenesis as a pathologic consequence such as cat scratch disease (Rochele minalia quintosa), ulcers (Helicobacter pylori), Bartonellosis and bacillary angiomatosis.

[0677] In one aspect of the birth control method, an amount of the compound sufficient to block embryo implantation is administered before or after intercourse and fertilization have occurred, thus providing an effective method of birth control, possibly a “morning after” method. Polynucleotides, polypeptides, agonists and/or agonists may also be used in controlling menstruation or administered as either a peritoneal lavage fluid or for peritoneal implantation in the treatment of endometriosis.

[0678] Polynucleotides, polypeptides, agonists and/or agonists of the present invention may be incorporated into surgical sutures in order to prevent stitch granulomas.

[0679] Polynucleotides, polypeptides, agonists and/or agonists may be utilized in a wide variety of surgical procedures. For example, within one aspect of the present invention a compositions (in the form of, for example, a spray or film) may be utilized to coat or spray an area prior to removal of a tumor, in order to isolate normal surrounding tissues from malignant tissue, and/or to prevent the spread of disease to surrounding tissues. Within other aspects of the present invention, compositions (e.g., in the form of a spray) may be delivered via endoscopic procedures in order to coat tumors, or inhibit angiogenesis in a desired locale. Within yet other aspects of the present invention, surgical meshes, which have been coated with anti-angiogenic compositions of the present invention may be utilized in any procedure wherein a surgical mesh might be utilized. For example, within one embodiment of the invention a surgical mesh laden with an anti-angiogenic composition may be utilized during abdominal cancer resection surgery (e.g., subsequent to colon resection) in order to provide support to the structure, and to release an amount of the anti-angiogenic factor.

[0680] Within further aspects of the present invention, methods are provided for treating tumor excision sites, comprising administering a polynucleotide, polypeptide, agonist and/or agonist to the resection margins of a tumor subsequent to excision, such that the local recurrence of cancer and the formation of new blood vessels at the site is inhibited. Within one embodiment of the invention, the anti-angiogenic compound is administered directly to the tumor excision site (e.g., applied by swabbing, brushing or otherwise coating the resection margins of the tumor with the anti-angiogenic compound). Alternatively, the anti-angiogenic compounds may be incorporated into known surgical pastes prior to administration. Within particularly preferred embodiments of the invention, the anti-angiogenic compounds are applied after hepatic resections for malignancy, and after neurosurgical operations.

[0681] Within one aspect of the present invention, polynucleotides, polypeptides, agonists and/or agonists may be administered to the resection margin of a wide variety of tumors, including for example, breast, colon, brain and hepatic tumors. For example, within one embodiment of the invention, anti-angiogenic compounds may be administered to the site of a neurological tumor subsequent to excision, such that the formation of new blood vessels at the site are inhibited.

[0682] The polynucleotides, polypeptides, agonists and/or agonists of the present invention may also be administered along with other anti-angiogenic factors. Representative examples of other anti-angiogenic factors include: Anti-Invasive Factor, retinoic acid and derivatives thereof, paclitaxel, Suramin, Tissue Inhibitor of Metalloproteinase-1, Tissue Inhibitor of Metalloproteinase-2, Plasminogen Activator Inhibitor-1, Plasminogen Activator Inhibitor-2, and various forms of the lighter “d group” transition metals.

[0683] Lighter “d group” transition metals include, for example, vanadium, molybdenum, tungsten, titanium, niobium, and tantalum species. Such transition metal species may form transition metal complexes. Suitable complexes of the above-mentioned transition metal species include oxo transition metal complexes.

[0684] Representative examples of vanadium complexes include oxo vanadium complexes such as vanadate and vanadyl complexes. Suitable vanadate complexes include metavanadate and orthovanadate complexes such as, for example, ammonium metavanadate, sodium metavanadate, and sodium orthovanadate. Suitable vanadyl complexes include, for example, vanadyl acetylacetonate and vanadyl sulfate including vanadyl sulfate hydrates such as vanadyl sulfate mono- and trihydrates.

[0685] Representative examples of tungsten and molybdenum complexes also include oxo complexes. Suitable oxo tungsten complexes include tungstate and tungsten oxide complexes. Suitable tungstate complexes include ammonium tungstate, calcium tungstate, sodium tungstate dihydrate, and tungstic acid. Suitable tungsten oxides include tungsten (IV) oxide and tungsten (VI) oxide. Suitable oxo molybdenum complexes include molybdate, molybdenum oxide, and molybdenyl complexes. Suitable molybdate complexes include ammonium molybdate and its hydrates, sodium molybdate and its hydrates, and potassium molybdate and its hydrates. Suitable molybdenum oxides include molybdenum (VI) oxide, molybdenum (VI) oxide, and molybdic acid. Suitable molybdenyl complexes include, for example, molybdenyl acetylacetonate. Other suitable tungsten and molybdenum complexes include hydroxo derivatives derived from, for example, glycerol, tartaric acid, and sugars.

[0686] A wide variety of other anti-angiogenic factors may also be utilized within the context of the present invention. Representative examples include platelet factor 4; protamine sulphate; sulphated chitin derivatives (prepared from queen crab shells), (Murata et al., Cancer Res. 51:22-26 (1991)); Sulphated Polysaccharide Peptidoglycan Complex (SP-PG) (the function of this compound may be enhanced by the presence of steroids such as estrogen, and tamoxifen citrate); Staurosporine; modulators of matrix metabolism, including for example, proline analogs, cishydroxyproline, d,L-3,4-dehydroproline, Thiaproline, alpha,alpha-dipyridyl, aminopropionitrile fimarate; 4-propyl-5-(4-pyridinyl)-2(3H)-oxazolone; Methotrexate; Mitoxantrone; Heparin; Interferons; 2 Macroglobulin-serum; ChIMP-3 (Pavloff et al., J. Bio. Chem. 267:17321-17326 (1992)); Chymostatin (Tomkinson et al., Biochem J. 286:475-480 (1992)); Cyclodextrin Tetradecasulfate; Eponemycin; Camptothecin; Fumagillin (Ingber et al., Nature 348:555-557 (1990)); Gold Sodium Thiomalate (“GST”; Matsubara and Ziff, J. Clin. Invest. 79:1440-1446 (1987)); anticollagenase-serum; alpha2-antiplasmin (Holmes et al., J. Biol. Chem. 262(4):1659-1664 (1987)); Bisantrene (National Cancer Institute); Lobenzarit disodium (N-(2)-carboxyphenyl-4-chloroanthronilic acid disodium or “CCA”; Takeuchi et al., Agents Actions 36:312-316, 1992); Thalidomide; Angostatic steroid; AGM-1470; carboxynaminolmidazole; and metalloproteinase inhibitors such as BB94. Musculoskeletal System Disorders

[0687] Polynucleotides, polypeptides, antibodies, and/or agonists or antagonists of the present invention, may be used to treat, prevent, diagnose, and/or prognose disorders of the musculoskeletal system, including but not limited to, disorders of the bone, joints, ligaments, tendons, bursa, muscle, and/or neoplasms and cancers associated with musculoskeletal tissue.

[0688] Diseases or disorders of the bone include, but are not limited to, Albers-Schönberg disease, bowlegs, heel spurs, Kohler's bone disease, knock-knees, Legg-Calve-Perthes disease, Marfan's syndrome, mucopolysaccharidoses, Osgood-Schlatter disease, osteochondroses, osteochondrodysplasia, osteomyelitis, osteopetroses, osteoporosis (postmenopausal, senile, and juvenile), Paget's disease, Scheuermann's disease, scoliosis, Sever's disease, and patellofemoral stress syndrome.

[0689] Joint diseases or disorders include, but are not limited to, ankylosing spondylitis, Behçet's syndrome, CREST syndrome, Ehlers-Danlos syndrome, infectious arthritis, discoid lupus erythematosus, systemic lupus erythematosus, Lyme disease, osteoarthritis, psoriatic arthritis, relapsing polychondrites, Reiter's syndrome, rheumatoid arthritis (adult andjuvenile), scleroderma, and Still's disease.

[0690] Diseases or disorders affecting ligaments, tendons, or bursa include, but are not limited to, ankle sprain, bursitis, posterior Achilles tendon bursitis (Haglund's deformity), anterior Achilles tendon bursitis (Albert's disease), tendinitis, tenosynovitis, poplieus tendinitis, Achilles tendinitis, medial or lateral epicondylitis, rotator cuff tendinitis, spasmodic torticollis, and fibromyalgia syndrome.

[0691] Muscle diseases or disorders include, but are not limited to, Becker's muscular dystrophy, Duchenne's muscular dystrophy, Landouzy-Dejerine muscular dystrophy, Leyden-Möbius muscular dystrophy, Erb's muscular dystrophy, Charcot's joints, dermatomyositis, gout, pseudogout, glycogen storage diseases, Pompe's disease, mitochondrial myopathy, periodic paralysis, polymyalgia rheumatica, polymyositis, Steinert's disease, Thomsen's disease, anterolateral and posteromedial shin splints, posterior femoral muscle strain, and fibromyositis.

[0692] Musculoskeletal tissue may also develop cancers and/or neoplasms that include, but are not limited to, osteochondroma, benign chondroma, chondroblastoma, chondromyxoid fibroma, osteoid osteoma, giant cell tumor, multiple myeloma, osteosarcoma, fibrosarcoma, malignant fibrous histiocytoma, chondrosarcoma, Ewing's tumor, and malignant lymphoma of bone.

[0693] Neural Activity and Neurological Diseases

[0694] The polynucleotides, polypeptides and agonists or antagonists of the invention may be used for the diagnosis and/or treatment of diseases, disorders, damage or injury of the brain and/or nervous system. Nervous system disorders that can be treated with the compositions of the invention (e.g., polypeptides, polynucleotides, and/or agonists or antagonists), include, but are not limited to, nervous system injuries, and diseases or disorders which result in either a disconnection of axons, a diminution or degeneration of neurons, or demyelination. Nervous system lesions which may be treated in a patient (including human and non-human mammalian patients) according to the methods of the invention, include but are not limited to, the following lesions of either the central (including spinal cord, brain) or peripheral nervous systems: (1) ischemic lesions, in which a lack of oxygen in a portion of the nervous system results in neuronal injury or death, including cerebral infarction or ischemia, or spinal cord infarction or ischemia; (2) traumatic lesions, including lesions caused by physical injury or associated with surgery, for example, lesions which sever a portion of the nervous system, or compression injuries; (3) malignant lesions, in which a portion of the nervous system is destroyed or injured by malignant tissue which is either a nervous system associated malignancy or a malignancy derived from non-nervous system tissue; (4) infectious lesions, in which a portion of the nervous system is destroyed or injured as a result of infection, for example, by an abscess or associated with infection by human immunodeficiency virus, herpes zoster, or herpes simplex virus or with Lyme disease, tuberculosis, or syphilis; (5) degenerative lesions, in which a portion of the nervous system is destroyed or injured as a result of a degenerative process including but not limited to, degeneration associated with Parkinson's disease, Alzheimer's disease, Huntington's chorea, or amyotrophic lateral sclerosis (ALS); (6) lesions associated with nutritional diseases or disorders, in which a portion of the nervous system is destroyed or injured by a nutritional disorder or disorder of metabolism including, but not limited to, vitamin B12 deficiency, folic acid deficiency, Wernicke disease, tobacco-alcohol amblyopia, Marchiafava-Bignami disease (primary degeneration of the corpus callosum), and alcoholic cerebellar degeneration; (7) neurological lesions associated with systemic diseases including, but not limited to, diabetes (diabetic neuropathy, Bell's palsy), systemic lupus erythematosus, carcinoma, or sarcoidosis; (8) lesions caused by toxic substances including alcohol, lead, or particular neurotoxins; and (9) demyelinated lesions in which a portion of the nervous system is destroyed or injured by a demyelinating disease including, but not limited to, multiple sclerosis, human immunodeficiency virus-associated myelopathy, transverse myelopathy or various etiologies, progressive multifocal leukoencephalopathy, and central pontine myelinolysis.

[0695] In one embodiment, the polypeptides, polynucleotides, or agonists or antagonists of the invention are used to protect neural cells from the damaging effects of hypoxia. In a further preferred embodiment, the polypeptides, polynucleotides, or agonists or antagonists of the invention are used to protect neural cells from the damaging effects of cerebral hypoxia. According to this embodiment, the compositions of the invention are used to treat or prevent neural cell injury associated with cerebral hypoxia. In one non-exclusive aspect of this embodiment, the polypeptides, polynucleotides, or agonists or antagonists of the invention, are used to treat or prevent neural cell injury associated with cerebral ischemia. In another non-exclusive aspect of this embodiment, the polypeptides, polynucleotides, or agonists or antagonists of the invention are used to treat or prevent neural cell injury associated with cerebral infarction.

[0696] In another preferred embodiment, the polypeptides, polynucleotides, or agonists or antagonists of the invention are used to treat or prevent neural cell injury associated with a stroke. In a specific embodiment, the polypeptides, polynucleotides, or agonists or antagonists of the invention are used to treat or prevent cerebral neural cell injury associated with a stroke.

[0697] In another preferred embodiment, the polypeptides, polynucleotides, or agonists or antagonists of the invention are used to treat or prevent neural cell injury associated with a heart attack. In a specific embodiment, the polypeptides, polynucleotides, or agonists or antagonists of the invention are used to treat or prevent cerebral neural cell injury associated with a heart attack.

[0698] The compositions of the invention which are useful for treating or preventing a nervous system disorder may be selected by testing for biological activity in promoting the survival or differentiation of neurons. For example, and not by way of limitation, compositions of the invention which elicit any of the following effects may be useful according to the invention: (1) increased survival time of neurons in culture either in the presence or absence of hypoxia or hypoxic conditions; (2) increased sprouting of neurons in culture or in vivo; (3) increased production of a neuron-associated molecule in culture or in vivo, e.g., choline acetyltransferase or acetylcholinesterase with respect to motor neurons; or (4) decreased symptoms of neuron dysfunction in vivo. Such effects may be measured by any method known in the art. In preferred, non-limiting embodiments, increased survival of neurons may routinely be measured using a method set forth herein or otherwise known in the art, such as, for example, in Zhang et al., Proc Natl Acad Sci USA 97:3637-42 (2000) or in Arakawa et al., J. Neurosci., 10:3507-15 (1990); increased sprouting of neurons may be detected by methods known in the art, such as, for example, the methods set forth in Pestronk et al., Exp. Neurol., 70:65-82 (1980), or Brown et al., Ann. Rev. Neurosci., 4:17-42 (1981); increased production of neuron-associated molecules may be measured by bioassay, enzymatic assay, antibody binding, Northern blot assay, etc., using techniques known in the art and depending on the molecule to be measured; and motor neuron dysfunction may be measured by assessing the physical manifestation of motor neuron disorder, e.g., weakness, motor neuron conduction velocity, or functional disability.

[0699] In specific embodiments, motor neuron disorders that may be treated according to the invention include, but are not limited to, disorders such as infarction, infection, exposure to toxin, trauma, surgical damage, degenerative disease or malignancy that may affect motor neurons as well as other components of the nervous system, as well as disorders that selectively affect neurons such as amyotrophic lateral sclerosis, and including, but not limited to, progressive spinal muscular atrophy, progressive bulbar palsy, primary lateral sclerosis, infantile and juvenile muscular atrophy, progressive bulbar paralysis of childhood (Fazio-Londe syndrome), poliomyelitis and the post polio syndrome, and Hereditary Motorsensory Neuropathy (Charcot-Marie-Tooth Disease).

[0700] Further, polypeptides or polynucleotides of the invention may play a role in neuronal survival; synapse formation; conductance; neural differentiation, etc. Thus, ;compositions of the invention (including polynucleotides, polypeptides, and agonists or antagonists) may be used to diagnose and/or treat or prevent diseases or disorders associated with these roles, including, but not limited to, learning and/or cognition disorders. The compositions of the invention may also be useful in the treatment or prevention of neurodegenerative disease states and/or behavioural disorders. Such neurodegenerative disease states and/or behavioral disorders include, but are not limited to, Alzheimer's Disease, Parkinson's Disease, Huntington's Disease, Tourette Syndrome, schizophrenia, mania, dementia, paranoia, obsessive compulsive disorder, panic disorder, learning disabilities, ALS, psychoses, autism, and altered behaviors, including disorders in feeding, sleep patterns, balance, and perception. In addition, compositions of the invention may also play a role in the treatment, prevention and/or detection of developmental disorders associated with the developing embryo, or sexually-linked disorders.

[0701] Additionally, polypeptides, polynucleotides and/or agonists or antagonists of the invention, may be useful in protecting neural cells from diseases, damage, disorders, or injury, associated with cerebrovascular disorders including, but not limited to, carotid artery diseases (e.g., carotid artery thrombosis, carotid stenosis, or Moyamoya Disease), cerebral amyloid angiopathy, cerebral aneurysm, cerebral anoxia, cerebral arteriosclerosis, cerebral arteriovenous malformations, cerebral artery diseases, cerebral embolism and thrombosis (e.g., carotid artery thrombosis, sinus thrombosis, or Wallenberg's Syndrome), cerebral hemorrhage (e.g., epidural or subdural hematoma, or subarachnoid hemorrhage), cerebral infarction, cerebral ischemia (e.g., transient cerebral ischemia, Subclavian Steal Syndrome, or vertebrobasilar insufficiency), vascular dementia (e.g., multi-infarct), leukomalacia, periventricular, and vascular headache (e.g., cluster headache or migraines).

[0702] In accordance with yet a further aspect of the present invention, there is provided a process for utilizing polynucleotides or polypeptides, as well as agonists or antagonists of the present invention, for therapeutic purposes, for example, to stimulate neurological cell proliferation and/or differentiation. Therefore, polynucleotides, polypeptides, agonists and/or antagonists of the invention may be used to treat and/or detect neurologic diseases. Moreover, polynucleotides or polypeptides, or agonists or antagonists of the invention, can be used as a marker or detector of a particular nervous system disease or disorder.

[0703] Examples of neurologic diseases which can be treated or detected with polynucleotides, polypeptides, agonists, and/or antagonists of the present invention include brain diseases, such as metabolic brain diseases which includes phenylketonuria such as maternal phenylketonuria, pyruvate carboxylase deficiency, pyruvate dehydrogenase complex deficiency, Wernicke's Encephalopathy, brain edema, brain neoplasms such as cerebellar neoplasms which include infratentorial neoplasms, cerebral ventricle neoplasms such as choroid plexus neoplasms, hypothalamic neoplasms, supratentorial neoplasms, canavan disease, cerebellar diseases such as cerebellar ataxia which include spinocerebellar degeneration such as ataxia telangiectasia, cerebellar dyssynergia, Friederich's Ataxia, Machado-Joseph Disease, olivopontocerebellar atrophy, cerebellar neoplasms such as infratentorial neoplasms, diffuse cerebral sclerosis such as encephalitis periaxialis, globoid cell leukodystrophy, metachromatic leukodystrophy and subacute sclerosing panencephalitis.

[0704] Additional neurologic diseases which can be treated or detected with polynucleotides, polypeptides, agonists, and/or antagonists of the present invention include cerebrovascular disorders (such as carotid artery diseases which include carotid artery thrombosis, carotid stenosis and Moyamoya Disease), cerebral amyloid angiopathy, cerebral aneurysm, cerebral anoxia, cerebral arteriosclerosis, cerebral arteriovenous malformations, cerebral artery diseases, cerebral embolism and thrombosis such as carotid artery thrombosis, sinus thrombosis and Wallenberg's Syndrome, cerebral hemorrhage such as epidural hematoma, subdural hematoma and subarachnoid hemorrhage, cerebral infarction, cerebral ischemia such as transient cerebral ischemia, Subclavian Steal Syndrome and vertebrobasilar insufficiency, vascular dementia such as multi-infarct dementia, periventricular leukomalacia, vascular headache such as cluster headache and migraine.

[0705] Additional neurologic diseases which can be treated or detected with polynucleotides, polypeptides, agonists, and/or antagonists of the present invention include dementia such as AIDS Dementia Complex, presenile dementia such as Alzheimer's Disease and Creutzfeldt-Jakob Syndrome, senile dementia such as Alzheimer's Disease and progressive supranuclear palsy, vascular dementia such as multi-infarct dementia, encephalitis which include encephalitis periaxialis, viral encephalitis such as epidemic encephalitis, Japanese Encephalitis, St. Louis Encephalitis, tick-borne encephalitis and West Nile Fever, acute disseminated encephalomyelitis, meningoencephalitis such as uveomeningoencephalitic syndrome, Postencephalitic Parkinson Disease and subacute sclerosing panencephalitis, encephalomalacia such as periventricular leukomalacia, epilepsy such as generalized epilepsy which includes infantile spasms, absence epilepsy, myoclonic epilepsy which includes MERRF Syndrome, tonic-clonic epilepsy, partial epilepsy such as complex partial epilepsy, frontal lobe epilepsy and temporal lobe epilepsy, post-traumatic epilepsy, status epilepticus such as Epilepsia Partialis Continua, and Hallervorden-Spatz Syndrome.

[0706] Additional neurologic diseases which can be treated or detected with polynucleotides, polypeptides, agonists, and/or antagonists of the present invention include hydrocephalus such as Dandy-Walker Syndrome and normal pressure hydrocephalus, hypothalamic diseases such as hypothalamic neoplasms, cerebral malaria, narcolepsy which includes cataplexy, bulbar poliomyelitis, cerebri pseudotumor, Rett Syndrome, Reye's Syndrome, thalamic diseases, cerebral toxoplasmosis, intracranial tuberculoma and Zellweger Syndrome, central nervous system infections such as AIDS Dementia Complex, Brain Abscess, subdural empyema, encephalomyelitis such as Equine Encephalomyelitis, Venezuelan Equine Encephalomyelitis, Necrotizing Hemorrhagic Encephalomyelitis, Visna, and cerebral malaria.

[0707] Additional neurologic diseases which can be treated or detected with polynucleotides, polypeptides, agonists, and/or antagonists of the present invention include meningitis such as arachnoiditis, aseptic meningtitis such as viral meningtitis which includes lymphocytic choriomeningitis, Bacterial meningtitis which includes Haemophilus Meningtitis, Listeria Meningtitis, Meningococcal Meningtitis such as Waterhouse-Friderichsen Syndrome, Pneumococcal Meningtitis and meningeal tuberculosis, fungal meningitis such as Cryptococcal Meningtitis, subdural effusion, meningoencephalitis such as uvemeningoencephalitic syndrome, myelitis such as transverse myelitis, neurosyphilis such as tabes dorsalis, poliomyelitis which includes bulbar poliomyelitis and postpoliomyelitis syndrome, prion diseases (such as Creutzfeldt-Jakob Syndrome, Bovine Spongiform Encephalopathy, Gerstmann-Straussler Syndrome, Kuru, Scrapie), and cerebral toxoplasmosis.

[0708] Additional neurologic diseases which can be treated or detected with polynucleotides, polypeptides, agonists, and/or antagonists of the present invention include central nervous system neoplasms such as brain neoplasms that include cerebellar neoplasms such as infratentorial neoplasms, cerebral ventricle neoplasms such as choroid plexus neoplasms, hypothalamic neoplasms and supratentorial neoplasms, meningeal neoplasms, spinal cord neoplasms which include epidural neoplasms, demyelinating diseases such as Canavan Diseases, diffuse cerebral sceloris which includes adrenoleukodystrophy, encephalitis periaxialis, globoid cell leukodystrophy, diffuse cerebral sclerosis such as metachromatic leukodystrophy, allergic encephalomyelitis, necrotizing hemorrhagic encephalomyelitis, progressive multifocal leukoencephalopathy, multiple sclerosis, central pontine myelinolysis, transverse myelitis, neuromyelitis optica, Scrapie, Swayback, Chronic Fatigue Syndrome, Visna, High Pressure Nervous Syndrome, Meningism, spinal cord diseases such as amyotonia congenita, amyotrophic lateral sclerosis, spinal muscular atrophy such as Werdnig-Hoffmann Disease, spinal cord compression, spinal cord neoplasms such as epidural neoplasms, syringomyelia, Tabes Dorsalis, Stiff-Man Syndrome, mental retardation such as Angelman Syndrome, Cri-du-Chat Syndrome, De Lange's Syndrome, Down Syndrome, Gangliosidoses such as gangliosidoses G(M1), Sandhoff Disease, Tay-Sachs Disease, Hartnup Disease, homocystinuria, Laurence-Moon-Biedl Syndrome, Lesch-Nyhan Syndrome, Maple Syrup Urine Disease, mucolipidosis such as fucosidosis, neuronal ceroid-lipofuscinosis, oculocerebrorenal syndrome, phenylketonuria such as maternal phenylketonuria, Prader-Willi Syndrome, Rett Syndrome, Rubinstein-Taybi Syndrome, Tuberous Sclerosis, WAGR Syndrome, nervous system abnormalities such as holoprosencephaly, neural tube defects such as anencephaly which includes hydrangencephaly, Arnold-Chairi Deformity, encephalocele, meningocele, meningomyelocele, spinal dysraphism such as spina bifida cystica and spina bifida occulta.

[0709] Additional neurologic diseases which can be treated or detected with polynucleotides, polypeptides, agonists, and/or antagonists of the present invention include hereditary motor and sensory neuropathies which include Charcot-Marie Disease, Hereditary optic atrophy, Refsum's Disease, hereditary spastic paraplegia, Werdnig-Hoffmann Disease, Hereditary Sensory and Autonomic Neuropathies such as Congenital Analgesia and Familial Dysautonomia, Neurologic manifestations (such as agnosia that include Gerstmann's Syndrome, Amnesia such as retrograde amnesia, apraxia, neurogenic bladder, cataplexy, communicative disorders such as hearing disorders that includes deafness, partial hearing loss, loudness recruitment and tinnitus, language disorders such as aphasia which include agraphia, anomia, broca aphasia, and Wernicke Aphasia, Dyslexia such as Acquired Dyslexia, tanguage development disorders, speech disorders such as aphasia which includes anomia, broca aphasia and Wernicke Aphasia, articulation disorders, communicative disorders such as speech disorders which include dysarthria, echolalia, mutism and stuttering, voice disorders such as aphonia and hoarseness, decerebrate state, delirium, fasciculation, hallucinations, meningism, movement disorders such as angelman syndrome, ataxia, athetosis, chorea, dystonia, hypokinesia, muscle hypotonia, myoclonus, tic, torticollis and tremor, muscle hypertonia such as muscle rigidity such as stiff-man syndrome, muscle spasticity, paralysis such as facial paralysis which includes Herpes Zoster Oticus, Gastroparesis, Hemiplegia, ophthalmoplegia such as diplopia, Duane's Syndrome, Homer's Syndrome, Chronic progressive external ophthalmoplegia such as Kearns Syndrome, Bulbar Paralysis, Tropical Spastic Paraparesis, Paraplegia such as Brown-Sequard Syndrome, quadriplegia, respiratory paralysis and vocal cord paralysis, paresis, phantom limb, taste disorders such as ageusia and dysgeusia, vision disorders such as amblyopia, blindness, color vision defects, diplopia, hemianopsia, scotoma and subnormal vision, sleep disorders such as hypersomnia which includes Kleine-Levin Syndrome, insomnia, and somnambulism, spasm such as trismus, unconsciousness such as coma, persistent vegetative state and syncope and vertigo, neuromuscular diseases such as amyotonia congenita, amyotrophic lateral sclerosis, Lambert-Eaton Myasthenic Syndrome, motor neuron disease, muscular atrophy such as spinal muscular atrophy, Charcot-Marie Disease and Werdnig-Hoffmann Disease, Postpoliomyelitis Syndrome, Muscular Dystrophy, Myasthenia Gravis, Myotonia Atrophica, Myotonia Confenita, Nemaline Myopathy, Familial Periodic Paralysis, Multiplex Paramyloclonus, Tropical Spastic Paraparesis and Stiff-Man Syndrome, peripheral nervous system diseases such as acrodynia, amyloid neuropathies, autonomic nervous system diseases such as Adie's Syndrome, Barre-Lieou Syndrome, Familial Dysautonomia, Homer's Syndrome, Reflex Sympathetic Dystrophy and Shy-Drager Syndrome, Cranial Nerve Diseases such as Acoustic Nerve Diseases such as Acoustic Neuroma which includes Neurofibromatosis 2, Facial Nerve Diseases such as Facial Neuralgia,Melkersson-Rosenthal Syndrome, ocular motility disorders which includes amblyopia, nystagmus, oculomotor nerve paralysis, ophthalmoplegia such as Duane's Syndrome, Horner's Syndrome, Chronic Progressive External Ophthalmoplegia which includes Kearns Syndrome, Strabismus such as Esotropia and Exotropia, Oculomotor Nerve Paralysis, Optic Nerve Diseases such as Optic Atrophy which includes Hereditary Optic Atrophy, Optic Disk Drusen, Optic Neuritis such as Neuromyelitis Optica, Papilledema, Trigeminal Neuralgia, Vocal Cord Paralysis, Demyelinating Diseases such as Neuromyelitis Optica and Swayback, and Diabetic neuropathies such as diabetic foot.

[0710] Additional neurologic diseases which can be treated or detected with polynucleotides, polypeptides, agonists, and/or antagonists of the present invention include nerve compression syndromes such as carpal tunnel syndrome, tarsal tunnel syndrome, thoracic outlet syndrome such as cervical rib syndrome, ulnar nerve compression syndrome, neuralgia such as causalgia, cervico-brachial neuralgia, facial neuralgia and trigeminal neuralgia, neuritis such as experimental allergic neuritis, optic neuritis, polyneuritis, polyradiculoneuritis and radiculities such as polyradiculitis, hereditary motor and sensory neuropathies such as Charcot-Marie Disease, Hereditary Optic Atrophy, Refsum's Disease, Hereditary Spastic Paraplegia and Werdnig-Hoffmann Disease, Hereditary Sensory and Autonomic Neuropathies which include Congenital Analgesia and Familial Dysautonomia, POEMS Syndrome, Sciatica, Gustatory Sweating and Tetany).

[0711] Endocrine Disorders

[0712] Polynucleotides or polypeptides, or agonists or antagonists of the present invention, may be used to treat, prevent, diagnose, and/or prognose disorders and/or diseases related to hormone imbalance, and/or disorders or diseases of the endocrine system.

[0713] Hormones secreted by the glands of the endocrine system control physical growth, sexual function, metabolism, and other functions. Disorders may be classified in two ways: disturbances in the production of hormones, and the inability of tissues to respond to hormones. The etiology of these hormone imbalance or endocrine system diseases, disorders or conditions may be genetic, somatic, such as cancer and some autoimmune diseases, acquired (e.g., by chemotherapy, injury or toxins), or infectious. Moreover, polynucleotides, polypeptides, antibodies, and/or agonists or antagonists of the present invention can be used as a marker or detector of a particular disease or disorder related to the endocrine system and/or hormone imbalance.

[0714] Endocrine system and/or hormone imbalance and/or diseases encompass disorders of uterine motility including, but not limited to: complications with pregnancy and labor (e.g., pre-term labor, post-term pregnancy, spontaneous abortion. and slow or stopped labor); and disorders and/or diseases of the menstrual cycle (e.g., dysmenorrhea and endometriosis).

[0715] Endocrine system and/or hormone imbalance disorders and/or diseases include disorders and/or diseases of the pancreas, such as, for example, diabetes mellitus, diabetes insipidus, congenital pancreatic agenesis, pheochromocytoma—islet cell tumor syndrome; disorders and/or diseases of the adrenal glands such as, for example, Addison's Disease, corticosteroid deficiency, virilizing disease, hirsutism, Cushing's Syndrome, hyperaldosteronism, pheochromocytoma; disorders and/or diseases of the pituitary gland, such as, for example, hyperpituitarism, hypopituitarism, pituitary dwarfism, pituitary adenoma, panhypopituitarism, acromegaly, gigantism; disorders and/or diseases of the thyroid, including but not limited to, hyperthyroidism, hypothyroidism, Plummer's disease, Graves' disease (toxic diffuse goiter), toxic nodular goiter, thyroiditis (Hashimoto's thyroiditis, subacute granulomatous thyroiditis, and silent lymphocytic thyroiditis), Pendred's syndrome, myxedema, cretinism, thyrotoxicosis, thyroid hormone coupling defect, thymic aplasia, Hurthle cell tumours of the thyroid, thyroid cancer, thyroid carcinoma, Medullary thyroid carcinoma; disorders and/or diseases of the parathyroid, such as, for example, hyperparathyroidism, hypoparathyroidism; disorders and/or diseases of the hypothalamus.

[0716] In addition, endocrine system and/or hormone imbalance disorders and/or diseases may also include disorders and/or diseases of the testes or ovaries, including cancer. Other disorders and/or diseases of the testes or ovaries further include, for example, ovarian cancer, polycystic ovary syndrome, Klinefelter's syndrome, vanishing testes syndrome (bilateral anorchia), congenital absence of Leydig's cells, cryptorchidism, Noonan's syndrome, myotonic dystrophy, capillary haemangioma of the testis (benign), neoplasias of the testis and neo-testis.

[0717] Moreover, endocrine system and/or hormone imbalance disorders and/or diseases may also include disorders and/or diseases such as, for example, polyglandular deficiency syndromes, pheochromocytoma, neuroblastoma, multiple Endocrine neoplasia, and disorders and/or cancers of endocrine tissues.

[0718] In another embodiment, a polypeptide of the invention, or polynucleotides, antibodies, agonists, or antagonists corresponding to that polypeptide, may be used to diagnose, prognose, prevent, and/or treat endocrine diseases and/or disorders associated with the tissue(s) in which the polypeptide of the invention is expressed, including one, two, three, four, five, or more tissues disclosed in Table 1A, column 7 (Tissue Distribution Library Code).

[0719] Reproductive System Disorders

[0720] The polynucleotides or polypeptides, or agonists or antagonists of the invention may be used for the diagnosis, treatment, or prevention of diseases and/or disorders of the reproductive system. Reproductive system disorders that can be treated by the compositions of the invention, include, but are not limited to, reproductive system injuries, infections, neoplastic disorders, congenital defects, and diseases or disorders which result in infertility, complications with pregnancy, labor, or parturition, and postpartum difficulties.

[0721] Reproductive system disorders and/or diseases include diseases and/or disorders of the testes, including, but not limited to, testicular atrophy, testicular feminization, cryptorchism (unilateral and bilateral), anorchia, ectopic testis, epididymitis and orchitis (typically resulting from infections such as, for example, gonorrhea, mumps, tuberculosis, and syphilis), testicular torsion, vasitis nodosa, germ cell tumors (e.g., seminomas, embryonal cell carcinomas, teratocarcinomas, choriocarcinomas, yolk sac tumors, and teratomas), stromal tumors (e.g., Leydig cell tumors), hydrocele, hematocele, varicocele, spermatocele, inguinal hernia, and disorders of sperm production (e.g., immotile cilia syndrome, aspermia, asthenozoospermia, azoospermia, oligospermia, and teratozoospermia).

[0722] Reproductive system disorders also include, but are not limited to, disorders of the prostate gland, such as acute non-bacterial prostatitis, chronic non-bacterial prostatitis, acute bacterial prostatitis, chronic bacterial prostatitis, prostatodystonia, prostatosis, granulomatous prostatitis, malacoplakia, benign prostatic hypertrophy or hyperplasia, and prostate neoplastic disorders, including adenocarcinomas, transitional cell carcinomas, ductal carcinomas, and squamous cell carcinomas.

[0723] Additionally, the compositions of the invention may be useful in the diagnosis, treatment, and/or prevention of disorders or diseases of the penis and urethra, including, but not limited to, inflammatory disorders, such as balanoposthitis, balanitis xerotica obliterans, phimosis, paraphimosis, syphilis, herpes simplex virus, gonorrhea, non-gonococcal urethritis, chlamydia, mycoplasma, trichomonas, HIV, AIDS, Reiter's syndrome, condyloma acuminatum, condyloma latum, and pearly penile papules; urethral abnormalities, such as hypospadias, epispadias, and phimosis; premalignant lesions, including Erythroplasia of Queyrat, Bowen's disease, Bowenoid paplosis, giant condyloma of Buscke-Lowenstein, and varrucous carcinoma; penile cancers, including squamous cell carcinomas, carcinoma in situ, verrucous carcinoma, and disseminated penile carcinoma; urethral neoplastic disorders, including penile urethral carcinoma, bulbomembranous urethral carcinoma, and prostatic urethral carcinoma; and erectile disorders, such as priapism, Peyronie's disease, erectile dysfunction, and impotence.

[0724] Moreover, diseases and/or disorders of the vas deferens include, but are not limited to, vasculititis and CBAVD (congenital bilateral absence of the vas deferens); additionally, the polynucleotides, polypeptides, and agonists or antagonists of the present invention may be used in the diagnosis, treatment, and/or prevention of diseases and/or disorders of the seminal vesicles, including but not limited to, hydatid disease, congenital chloride diarrhea, and polycystic kidney disease.

[0725] Other disorders and/or diseases of the male reproductive system that may be diagnosed, treated, and/or prevented with the compositions of the invention include, but are not limited to, Klinefelter's syndrome, Young's syndrome, premature ejaculation, diabetes mellitus, cystic fibrosis, Kartagener's syndrome, high fever, multiple sclerosis, and gynecomastia.

[0726] Further, the polynucleotides, polypeptides, and agonists or antagonists of the present invention may be used in the diagnosis, treatment, and/or prevention of diseases and/or disorders of the vagina and vulva, including, but not limited to, bacterial vaginosis, candida vaginitis, herpes simplex virus, chancroid, granuloma inguinale, lymphogranuloma venereum, scabies, human papillomavirus, vaginal trauma, vulvar trauma, adenosis, chlamydia vaginitis, gonorrhea, trichomonas vaginitis, condyloma acuminatum, syphilis, molluscum contagiosum, atrophic vaginitis, Paget's disease, lichen sclerosus, lichen planus, vulvodynia, toxic shock syndrome, vaginismus, vulvovaginitis, vulvar vestibulitis, and neoplastic disorders, such as squamous cell hyperplasia, clear cell carcinoma, basal cell carcinoma, melanomas, cancer of Bartholin's gland, and vulvar intraepithelial neoplasia.

[0727] Disorders and/or diseases of the uterus that may be diagnosed, treated, and/or prevented with the compositions of the invention include, but are not limited to, dysmenorrhea, retroverted uterus, endometriosis, fibroids, adenomyosis, anovulatory bleeding, amenorrhea, Cushing's syndrome, hydatidiform moles, Asherman's syndrome, premature menopause, precocious puberty, uterine polyps, dysfunctional uterine bleeding (e.g., due to aberrant hormonal signals), and neoplastic disorders, such as adenocarcinomas, keiomyosarcomas, and sarcomas. Additionally, the polypeptides, polynucleotides, or agonists or antagonists of the invention may be useful as a marker or detector of, as well as in the diagnosis, treatment, and/or prevention of congenital uterine abnormalities, such as bicornuate uterus, septate uterus, simple unicornuate uterus, unicornuate uterus with a noncavitary rudimentary horn, unicornuate uterus with a non-communicating cavitary rudimentary horn, unicornuate uterus with a communicating cavitary horn, arcuate uterus, uterine didelfus, and T-shaped uterus.

[0728] Ovarian diseases and/or disorders that may be diagnosed, treated, and/or prevented with the compositions of the invention include, but are not limited to, anovulation, polycystic ovary syndrome (Stein-Leventhal syndrome), ovarian cysts, ovarian hypofunction, ovarian insensitivity to gonadotropins, ovarian overproduction of androgens, right ovarian vein syndrome, amenorrhea, hirutism, and ovarian cancer (including, but not limited to, primary and secondary cancerous growth, Sertoli-Leydig tumors, endometriod carcinoma of the ovary, ovarian papillary serous adenocarcinoma, ovarian mucinous adenocarcinoma, and Ovarian Krukenberg tumors).

[0729] Cervical diseases and/or disorders that may be diagnosed, treated, and/or prevented with the compositions of the invention include, but are not limited to, cervicitis, chronic cervicitis, mucopurulent cervicitis, cervical dysplasia, cervical polyps, Nabothian cysts, cervical erosion, cervical incompetence, and cervical neoplasms (including, for example, cervical carcinoma, squamous metaplasia, squamous cell carcinoma, adenosquamous cell neoplasia, and columnar cell neoplasia).

[0730] Additionally, diseases and/or disorders of the reproductive system that may be diagnosed, treated, and/or prevented with the compositions of the invention include, but are not limited to, disorders and/or diseases of pregnancy, including miscarriage and stillbirth, such as early abortion, late abortion, spontaneous abortion, induced abortion, therapeutic abortion, threatened abortion, missed abortion, incomplete abortion, complete abortion, habitual abortion, missed abortion, and septic abortion; ectopic pregnancy, anemia, Rh incompatibility, vaginal bleeding during pregnancy, gestational diabetes, intrauterine growth retardation, polyhydramnios, HELLP syndrome, abruptio placentae, placenta previa, hyperemesis, preeclampsia, eclampsia, herpes gestationis, and urticaria of pregnancy. Additionally, the polynucleotides, polypeptides, and agonists or antagonists of the present invention may be used in the diagnosis, treatment, and/or prevention of diseases that can complicate pregnancy, including heart disease, heart failure, rheumatic heart disease, congenital heart disease, mitral valve prolapse, high blood pressure, anemia, kidney disease, infectious disease (e.g., rubella, cytomegalovirus, toxoplasmosis, infectious hepatitis, chlamydia, HIV, AIDS, and genital herpes), diabetes mellitus, Graves' disease, thyroiditis, hypothyroidism, Hashimoto's thyroiditis, chronic active hepatitis, cirrhosis of the liver, primary biliary cirrhosis, asthma, systemic lupus eryematosis, rheumatoid arthritis, myasthenia gravis, idiopathic thrombocytopenic purpura, appendicitis, ovarian cysts, gallbladder disorders,and obstruction of the intestine.

[0731] Complications associated with labor and parturition that may be diagnosed, treated, and/or prevented with the compositions of the invention include, but are not limited to, premature rupture of the membranes, pre-term labor, post-term pregnancy, postmaturity, labor that progresses too slowly, fetal distress (e.g., abnormal heart rate (fetal or maternal), breathing problems, and abnormal fetal position), shoulder dystocia, prolapsed umbilical cord, amniotic fluid embolism, and aberrant uterine bleeding.

[0732] Further, diseases and/or disorders of the postdelivery period, that may be diagnosed, treated, and/or prevented with the compositions of the invention, include, but are not limited to, endometritis, myometritis, parametritis, peritonitis, pelvic thrombophlebitis, pulmonary embolism, endotoxemia, pyelonephritis, saphenous thrombophlebitis, mastitis, cystitis, postpartum hemorrhage, and inverted uterus.

[0733] Other disorders and/or diseases of the female reproductive system that may be diagnosed, treated, and/or prevented by the polynucleotides, polypeptides, and agonists or antagonists of the present invention include, but are not limited to, Turner's syndrome, pseudohermaphroditism, premenstrual syndrome, pelvic inflammatory disease, pelvic congestion (vascular engorgement), frigidity, anorgasmia, dyspareunia, ruptured fallopian tube, and Mittelschmerz.

[0734] Developmental and Inherited Disorders

[0735] Polynuceotides or polypeptides, or agonists or antagonists of the present invention may be used to treat, prevent, diagnose, and/or prognose diseases associated with mixed fetal tissues, including, but not limited to, developmental and inherited disorders or defects of the nervous system, musculoskelelal system, execretory system, cardiovascular system, hematopoietic system, gastrointestinal system, reproductive system, and respiratory system. Compositions of the present invention may also be used to treat, prevent, diagnose, and/or prognose developmental and inherited disorders or defects associated with, but not limited to, skin, hair, visual, and auditory tissues, metabolism. Additionally, the compositions of the invention may be useful in the diagnosis, treatment, and/or prevention of disorders or diseases associated with, but not limited to, chromosomal or genetic abnormalities and hyperproliferation or neoplasia.

[0736] Disorders or defects of the nervous system associated with developmental or inherited abnormalities that may be diagnosed, treated, and/or prevented with the compostions of the invention include, but are not limited to, adrenoleukodystrophy, agenesis of corpus callosum, Alexander disease, anencephaly, Angelman syndrome, Arnold-Chiari deformity, Batten disease, Canavan disease, cephalic disorders, Charcot-Marie-Tooth disease, encephalocele, Friedreich's ataxia, Gaucher's disease, Gorlin syndrome, Hallervorden-Spatz disease, hereditary spastic paraplegia, Huntington disease, hydranencephaly, hydrocephalus, Joubert syndrome, Lesch-Nyhan syndrome, leukodystrophy, Menkes disease, microcephaly, Niemann-Pick Type C1, neurofibromatosis, porencephaly, progeria, proteus syndrome, Refsum disease, spina bifida, Sturge-Weber syndrome, Tay-Sachs disease, tuberous sclerosis, and von Hippel-Lindau disease.

[0737] Developmental and inherited disorders resulting in disorders or defects of the musculoskeletal system that may be diagnosed, treated, and/or prevented with the compositions of the invention include, but are not limited to, achondroplasia, atlanto-occipital fusion, arthrogryposis mulitplex congenita, autosomal recessive muscular dystrophy, Becker's muscular dystrophy, cerebral palsy, choanal atresia, cleft lip, cleft palate, clubfoot, congenital amputation, congenital dislocation of the hip, congenital torticollis, congenital scoliosis, dopa-repsonsive dystonia, Duchenne muscular dystrophy, early-onset generalized dystonia, femoral torsion, Gorlin syndrome, hypophosphatasia, Klippel-Feil syndrome, knee dislocation, myoclonic dystonia, myotonic dystrophy, nail-patella syndrome, osteogenesis imperfecta, paroxysmal dystonia, progeria, prune-belly syndrome, rapid-onset dystonia parkinsonism, scolosis, syndactyly, Treacher Collins′ syndrome, velocardiofacial syndrome, and X-linked dystonia-parkinsonism.

[0738] Developmental or hereditary disorders or defects of the excretory system that may be diagnosed, treated, and/or prevented with the compositions of the invention include, but are not limited to, Alport's syndrome, Bartter's syndrome, bladder diverticula, bladder exstrophy, cystinuria, epispadias, Fanconi's syndrome, Hartnup disease, horseshoe kidney, hypospadias, kidney agenesis, kidney ectopia, kidney malrotation, Liddle's syndrome, medullary cystic disease, medullary sponge, multicystic kidney, kidney polycystic kidney disease, nail-patella syndrome, Potter's syndrome, urinary tract flow obstruction, vitamin D-resistant rickets, and Wilm's tumor.

[0739] Cardiovascular disorders or defects of developmental or hereditary origin that may be diagnosed, treated, and/or prevented with the compositions of the inventtion include, but are not limited to, aortic valve stenosis, atrial septal defects, artioventricular (A-V) canal defect, bicuspid aortic valve, coarctation or the aorta, dextrocardia, Ebstein's anomaly, Eisenmenger's complex, hypoplastic left heart syndrome, Marfan syndrome, patent ductus arteriosus, progeria, pulmonary atresia, pulmonary valve stenosis, subaortic stenosis, tetralogy of fallot, total anomalous pulmonary venous (P-V) connection, transposition of the great arteries, tricuspid atresia, truncus arteriosus, ventricular septal defects. Developmental or inherited disorders resulting in disorders involving the hematopoietic system that may be diagnosed, treated, and/or prevented with the compositions of the invention include, but not limited to, Bemard-Soulier syndrome, Chediak-Higashi syndrome, hemophilia, Hermansky-Pudlak syndrome, sickle cell anemia, storage pool disease, thromboxane A2 dysfunction, thrombasthenia, and von Willebrand's disease.

[0740] The compositions of the invention may also be used to diagnose, treat, and/or prevent developmental and inherited disorders resulting in disorders or defects of the gastrointestinal system, including, but not limited to, anal atresia, biliary atresia, esophageal atresia, diaphragmatic hernia, Hirschsprung's disease, Meckel's diverticulum, oligohydramnios, omphalocele, polyhydramnios, porphyria, situs inversus viscera. Developmental or inherited disorders resulting in metabolic disorders that may be diagnosed, treated, and/or prevented with the compositions of the invention include, but are not limited to, alpha-1 antitrypsin deficiency, cystic fibrosis, hemochromatosis, lysosomal storage disease, phenylketonuria, Wilson's disease, and Zellweger syndrome.

[0741] Disorders of the reproductive system that are developmentally or hereditary related that may also be diagnosed, treated, and/or prevented with the compositions of the invention include, but are not limited to, androgen insensitivity syndrome, ambiguous genitalia, autosomal sex reversal, congenital adreneal hyperplasia, gonadoblastoma, ovarian germ cell cancer, pseudohermphroditism, true hermaphroditism, undescended testis, XX male syndrome, and XY female type gonadal dysgenesis. The compositions of the invention may also be used to diagnose, treat, and/or prevent developmental or inherited respiratory defects including, but not limited to, askin tumor, azygos lobe, congenital diaphragmatic hernia, congenital lobar emphysema, cystic adenomatoid malformation, lobar emphysema, hyaline membrane disease, and pectus excavatum.

[0742] Developmental or inherited disorders may also result from chromosomal or genetic aberration that may be diagnosed, treated, and/or prevented with the compositions of the invention including, but not limited to, 4p-syndrome, cri du chat syndrome, Digeorge syndrome, Down's syndrome, Edward's syndrome, fragile X syndrome, Klinefelter's syndrome, Patau's syndrome, Prader-Willi syndrome, progeria, Turner's syndrome, triple X syndrome, and XYY syndrome. Other developmental disorders that can be diagnosed, treated, and/or prevented with the compositions of the invention, include, but are not limited to, fetal alcohol syndrome, and can be caused by enviromnental factors surrounding the developing fetus.

[0743] The compositions of the invention may further be able to be used to diagnose, treat, and/or prevent errors in development or a genetic disposition that may result in hyperproliferative disorders or neoplasms, including, but not limited to, acute childhood lymphoblastic leukemia, askin tumor, Beckwith-Wiedemann syndrome, childhood acute myeloid leukemia, childhood brain stem glioma, childhood cerebellar astrocytoma, childhood extracranial germ cell tumors childhood (primary), gonadoblastoma, hepatocellular cancer, childhood Hodgkin's disease, childhood Hodgkin's lymphoma, childhood hypothalamic and visual pathway glioma, childhood (primary) liver cancer, childhood lymphoblastic leukemia, childhood medulloblastoma, childhood non-Hodgkin's lymphoma, childhood pineal and supratentorial primitive neuroectodermal tumors, childhood primary liver cancer, childhood rhabdomyosarcoma, childhood soft tissue sarcoma, Gorlin syndrome, familial multiple endrocrine neoplasia type I, neuroblastoma, ovarian germ cell cancer, pheochromocytoma, retinoblastoma, and Wilm's tumor.

[0744] Polypeptides may be administered using any method known in the art, including, but not limited to, direct needle injection at the delivery site, intravenous injection, topical administration, catheter infusion, biolistic injectors, particle accelerators, gelfoam sponge depots, other commercially available depot materials, osmotic pumps, oral or suppositorial solid pharmaceutical formulations, decanting or topical applications during surgery, aerosol delivery. Such methods are known in the art. Polypeptides may be administered as part of a Therapeutic, described in more detail below. Methods of delivering polynucleotides are described in more detail herein.

[0745] Diseases at the Cellular Level

[0746] Diseases associated with increased cell survival or the inhibition of apoptosis that could be treated, prevented, diagnosed and/or prognosed using polynucleotides or polypeptides, as well as antagonists or agonists of the present invention, include cancers (such as follicular lymphomas, carcinomas with p53 mutations, and hormone-dependent tumors, including, but not limited to colon cancer, cardiac tumors, pancreatic cancer, melanoma, retinoblastoma, glioblastoma, lung cancer, intestinal cancer, testicular cancer, stomach cancer, neuroblastoma, myxoma, myoma, lymphoma, endothelioma, osteoblastoma, osteoclastoma, osteosarcoma, chondrosarcoma, adenoma, breast cancer, prostate cancer, Kaposi's sarcoma and ovarian cancer); autoimmune disorders (such as, multiple sclerosis, Sjogren's syndrome, Hashimoto's thyroiditis, biliary cirrhosis, Behçet's disease, Crohn's disease, polymyositis, systemic lupus erythematosus and immune-related glomerulonephritis and rheumatoid arthritis) and viral infections (such as herpes viruses, pox viruses and adenoviruses), inflammation, graft v. host disease, acute graft rejection, and chronic graft rejection.

[0747] In preferred embodiments, polynucleotides, polypeptides, and/or antagonists of the invention are used to inhibit growth, progression, and/or metastasis of cancers, in particular those [listed above] involving colorectal tissues.

[0748] Additional diseases or conditions associated with increased cell survival that could be treated or detected by polynucleotides or polypeptides, or agonists or antagonists of the present invention include, but are not limited to, progression, and/or metastases of malignancies and related disorders such as leukemia (including acute leukemias (e.g., acute lymphocytic leukemia, acute myelocytic leukemia (including myeloblastic, promyelocytic, myelomonocytic, monocytic, and erythroleukemia)) and chronic leukemias (e.g., chronic myelocytic (granulocytic) leukemia and chronic lymphocytic leukemia)), polycythemia vera, lymphomas (e.g., Hodgkin's disease and non-Hodgkin's disease), multiple myeloma, Waldenstrom's macroglobulinemia, heavy chain disease, and solid tumors including, but not limited to, sarcomas and carcinomas such as fibrosarcoma, myxosarcoma, liposarcoma, chondrosarcoma, osteogenic sarcoma, chordoma, angiosarcoma, endotheliosarcoma, lymphangiosarcoma, lymphangioendotheliosarcoma, synovioma, mesothelioma, Ewing's tumor, leiomyosarcoma, rhabdomyosarcoma, colon carcinoma, pancreatic cancer, breast cancer, ovarian cancer, prostate cancer, squamous cell carcinoma, basal cell carcinoma, adenocarcinoma, sweat gland carcinoma, sebaceous gland carcinoma, papillary carcinoma, papillary adenocarcinomas, cystadenocarcinoma, medullary carcinoma, bronchogenic carcinoma, renal cell carcinoma, hepatoma, bile duct carcinoma, choriocarcinoma, seminoma, embryonal carcinoma, Wilm's tumor, cervical cancer, testicular tumor, lung carcinoma, small cell lung carcinoma, bladder carcinoma, epithelial carcinoma, glioma, astrocytoma, medulloblastoma, craniopharyngioma, ependymoma, pinealoma, hemangioblastoma, acoustic neuroma, oligodendroglioma, menangioma, melanoma, neuroblastoma, and retinoblastoma.

[0749] Diseases associated with increased apoptosis that could be treated, prevented, diagnosted, and/or prognosed using polynucleotides or polypeptides, as well as agonists or antagonists of the present invention, include, but are not limited to, AIDS; neurodegenerative disorders (such as Alzheimer's disease, Parkinson's disease, Amyotrophic lateral sclerosis, Retinitis pigmentosa, Cerebellar degeneration and brain tumor or prior associated disease); autoimmune disorders (such as, multiple sclerosis, Sjogren's syndrome, Hashimoto's thyroiditis, biliary cirrhosis, Behçet's disease, Crohn's disease, polymyositis, systemic lupus erythematosus and immune-related glomerulonephritis and rheumatoid arthritis) myelodysplastic syndromes (such as aplastic anemia), graft v. host disease, ischemic injury (such as that caused by myocardial infarction, stroke and reperfusion injury), liver injury (e.g., hepatitis related liver injury, ischemia/reperfusion injury, cholestosis (bile duct injury) and liver cancer); toxin-induced liver disease (such as that caused by alcohol), septic shock, cachexia and anorexia.

[0750] Wound Healing and Epithelial Cell Proliferation

[0751] In accordance with yet a further aspect of the present invention, there is provided a process for utilizing polynucleotides or polypeptides, as well as agonists or antagonists of the present invention, for therapeutic purposes, for example, to stimulate epithelial cell proliferation and basal keratinocytes for the purpose of wound healing, and to stimulate hair follicle production and healing of dermal wounds. Polynucleotides or polypeptides, as well as agonists or antagonists of the present invention, may be clinically useful in stimulating wound healing including surgical wounds, excisional wounds, deep wounds involving damage of the dermis and epidermis, eye tissue wounds, dental tissue wounds, oral cavity wounds, diabetic ulcers, dermal ulcers, cubitus ulcers, arterial ulcers, venous stasis ulcers, burns resulting from heat exposure or chemicals, and other abnormal wound healing conditions such as uremia, malnutrition, vitamin deficiencies and complications associated with systemic treatment with steroids, radiation therapy and antineoplastic drugs and antimetabolites. Polynucleotides or polypeptides, as well as agonists or antagonists of the present invention, could be used to promote dermal reestablishment subsequent to dermal loss.

[0752] Polynucleotides or polypeptides, as well as agonists or antagonists of the present invention, could be used to increase the adherence of skin grafts to a wound bed and to stimulate re-epithelialization from the wound bed. The following are types of grafts that polynucleotides or polypeptides, agonists or antagonists of the present invention, could be used to increase adherence to a wound bed: autografts, artificial skin, allografts, autodermic graft, autoepdermic grafts, avacular grafts, Blair-Brown grafts, bone graft, brephoplastic grafts, cutis graft, delayed graft, dermic graft, epidermic graft, fascia graft, full thickness graft, heterologous graft, xenograft, homologous graft, hyperplastic graft, lamellar graft, mesh graft, mucosal graft, Ollier-Thiersch graft, omenpal graft, patch graft, pedicle graft, penetrating graft, split skin graft, thick split graft. Polynucleotides or polypeptides, as well as agonists or antagonists of the present invention, can be used to promote skin strength and to improve the appearance of aged skin.

[0753] It is believed that polynucleotides or polypeptides, as well as agonists or antagonists of the present invention, will also produce changes in hepatocyte proliferation, and epithelial cell proliferation in the lung, breast, pancreas, stomach, small intestine, and large intestine. Polynucleotides or polypeptides, as well as agonists or antagonists of the present invention, could promote proliferation of epithelial cells such as sebocytes, hair follicles, hepatocytes, type II pneumocytes, mucin-producing goblet cells, and other epithelial cells and their progenitors contained within the skin, lung, liver, and gastrointestinal tract. Polynucleotides or polypeptides, agonists or antagonists of the present invention, may promote proliferation of endothelial cells, keratinocytes, and basal keratinocytes.

[0754] Polynucleotides or polypeptides, as well as agonists or antagonists of the present invention, could also be used to reduce the side effects of gut toxicity that result from radiation, chemotherapy treatments or viral infections. Polynucleotides or polypeptides, as well as agonists or antagonists of the present invention, may have a cytoprotective effect on the small intestine mucosa. Polynucleotides or polypeptides, as well as agonists or antagonists of the present invention, may also stimulate healing of mucositis (mouth ulcers) that result from chemotherapy and viral infections.

[0755] Polynucleotides or polypeptides, as well as agonists or antagonists of the present invention, could further be used in full regeneration of skin in full and partial thickness skin defects, including burns, (i.e., repopulation of hair follicles, sweat glands, and sebaceous glands), treatment of other skin defects such as psoriasis. Polynucleotides or polypeptides, as well as agonists or antagonists of the present invention, could be used to treat epidermolysis bullosa, a defect in adherence of the epidermis to the underlying dermis which results in frequent, open and painful blisters by accelerating reepithelialization of these lesions. Polynucleotides or polypeptides, as well as agonists or antagonists of the present invention, could also be used to treat gastric and doudenal ulcers and help heal by scar formation of the mucosal lining and regeneration of glandular mucosa and duodenal mucosal lining more rapidly. Inflammatory bowel diseases, such as Crohn's disease and ulcerative colitis, are diseases, which result in destruction of the mucosal surface of the small or large intestine, respectively. Thus, polynucleotides or polypeptides, as well as agonists or antagonists of the present invention, could be used to promote the resurfacing of the mucosal surface to aid more rapid healing and to prevent progression of inflammatory bowel disease. Treatment with polynucleotides or polypeptides, agonists or antagonists of the present invention, is expected to have a significant effect on the production of mucus throughout the gastrointestinal tract and could be used to protect the intestinal mucosa from injurious substances that are ingested or following surgery. Polynucleotides or polypeptides, as well as agonists or antagonists of the present invention, could be used to treat diseases associate with the under expression.

[0756] Moreover, polynucleotides or polypeptides, as well as agonists or antagonists of the present invention, could be used to prevent and heal damage to the lungs due to various pathological states. Polynucleotides or polypeptides, as well as agonists or antagonists of the present invention, could stimulate proliferation and differentiation and promote the repair of alveoli and brochiolar epithelium to prevent or treat acute or chronic lung damage. For example, emphysema, which results in the progressive loss of aveoli, and inhalation injuries, i.e., resulting from smoke inhalation and bums, that cause necrosis of the bronchiolar epithelium and alveoli could be effectively treated using polynucleotides or polypeptides, agonists or antagonists of the present invention. Also, polynucleotides or polypeptides, as well as agonists or antagonists of the present invention, could be used to stimulate the proliferation of and differentiation of type II pneumocytes, which may help treat or prevent disease such as hyaline membrane diseases, such as infant respiratory distress syndrome and bronchopulmonary displasia, in premature infants.

[0757] Polynucleotides or polypeptides, as well as agonists or antagonists of the present invention, could stimulate the proliferation and differentiation of hepatocytes and, thus, could be used to alleviate or treat liver diseases and pathologies such as fulminant liver failure caused by cirrhosis, liver damage caused by viral hepatitis and toxic substances (i.e., acetaminophen, carbon tetraholoride and other hepatotoxins known in the art).

[0758] In addition, polynucleotides or polypeptides, as well as agonists or antagonists of the present invention, could be used treat or prevent the onset of diabetes mellitus. In patients with newly diagnosed Types I and II diabetes, where some islet cell function remains, polynucleotides or polypeptides, as well as agonists or antagonists of the present invention, could be used to maintain the islet function so as to alleviate, delay or prevent permanent manifestation of the disease. Also, polynucleotides or polypeptides, as well as agonists or antagonists of the present invention, could be used as an auxiliary in islet cell transplantation to improve or promote islet cell function.

[0759] Infectious Disease

[0760] Polynucleotides or polypeptides, as well as agonists or antagonists of the present invention can be used to treat or detect infectious agents. For example, by increasing the immune response, particularly increasing the proliferation and differentiation of B and/or T cells, infectious diseases may be treated. The immune response may be increased by either enhancing an existing immune response, or by initiating a new immune response. Alternatively, polynucleotides or polypeptides, as well as agonists or antagonists of the present invention may also directly inhibit the infectious agent, without necessarily eliciting an immune response.

[0761] Viruses are one example of an infectious agent that can cause disease or symptoms that can be treated or detected by a polynucleotide or polypeptide and/or agonist or antagonist of the present invention. Examples of viruses, include, but are not limited to Examples of viruses, include, but are not limited to the following DNA and RNA viruses and viral families: Arbovirus, Adenoviridae, Arenaviridae, Arterivirus, Bimaviridae, Bunyaviridae, Caliciviridae, Circoviridae, Coronaviridae, Dengue, EBV, HIV, Flaviviridae, Hepadnaviridae (Hepatitis), Herpesviridae (such as, Cytomegalovirus, Herpes Simplex, Herpes Zoster), Mononegavirus (e.g., Paramyxoviridae, Morbillivirus, Rhabdoviridae), Orthomyxoviridae (e.g., Influenza A, Influenza B, and parainfluenza), Papiloma virus, Papovaviridae, Parvoviridae, Picornaviridae, Poxviridae (such as Smallpox or Vaccinia), Reoviridae (e.g., Rotavirus), Retroviridae (HTLV-I, HTLV-II, Lentivirus), and Togaviridae (e.g., Rubivirus). Viruses falling within these families can cause a variety of diseases or symptoms, including, but not limited to: arthritis, bronchiollitis, respiratory syncytial virus, encephalitis, eye infections (e.g., conjunctivitis, keratitis), chronic fatigue syndrome, hepatitis (A, B, C, E, Chronic Active, Delta), Japanese B encephalitis, Junin, Chikungunya, Rift Valley fever, yellow fever, meningitis, opportunistic infections (e.g., AIDS), pneumonia, Burkitt's Lymphoma, chickenpox, hemorrhagic fever, Measles, Mumps, Parainfluenza, Rabies, the common cold, Polio, leukemia, Rubella, sexually transmitted diseases, skin diseases (e.g., Kaposi's, warts), and viremia. polynucleotides or polypeptides, or agonists or antagonists of the invention, can be used to treat or detect any of these symptoms or diseases. In specific embodiments, polynucleotides, polypeptides, or agonists or antagonists of the invention are used to treat: meningitis, Dengue, EBV, and/or hepatitis (e.g., hepatitis B). In an additional specific embodiment polynucleotides, polypeptides, or agonists or antagonists of the invention are used to treat patients nonresponsive to one or more other commercially available hepatitis vaccines. In a further specific embodiment polynucleotides, polypeptides, or agonists or antagonists of the invention are used to treat AIDS.

[0762] Similarly, bacterial or fungal agents that can cause disease or symptoms and that can be treated or detected by a polynucleotide or polypeptide and/or agonist or antagonist of the present invention include, but not limited to, include, but not limited to, the following Gram-Negative and Gram-positive bacteria and bacterial families and fungi: Actinomycetales (e.g., Corynebacterium, Mycobacterium, Norcardia), Cryptococcus neoformans, Aspergillosis, Bacillaceae (e.g., Anthrax, Clostridium), Bacteroidaceae, Blastomycosis, Bordetella, Borrelia (e.g., Borrelia burgdorferi, Brucellosis, Candidiasis, Campylobacter, Coccidioidomycosis, Cryptococcosis, Dermatocycoses, E. coli (e.g., Enterotoxigenic E. coli and Enterohemorrhagic E. coli), Enterobacteriaceae (Klebsiella, Salmonella (e.g., Salmonella typhi, and Salmonella paratyphi), Serratia, Yersinia), Erysipelothrix, Helicobacter, Legionellosis, Leptospirosis, Listeria, Mycoplasmatales, Mycobacterium leprae, Vibrio cholerae, Neisseriaceae (e.g., Acinetobacter, Gonorrhea, Menigococcal), Meisseria meningitidis, Pasteurellacea Infections (e.g., Actinobacillus, Heamophilus (e.g., Heamophilus influenza type B), Pasteurella), Pseudomonas, Rickettsiaceae, Chlamydiaceae, Treponema spp., Leptospira spp., Shigella spp., Staphylococcal, Meningiococcal, Pneumococcal and Streptococcal (e.g., Streptococcus pneumoniae and Group B Streptococcus). These bacterial or fungal families can cause the following diseases or symptoms, including, but not limited to: bacteremia, endocarditis, eye infections (conjunctivitis, tuberculosis, uveitis), gingivitis, opportunistic infections (e.g., AIDS related infections), paronychia, prosthesis-related infections, Reiter's Disease, respiratory tract infections, such as Whooping Cough or Empyema, sepsis, Lyme Disease, Cat-Scratch Disease, Dysentery, Paratyphoid Fever, food poisoning, Typhoid, pneumonia, Gonorrhea, meningitis (e.g., mengitis types A and B), Chlamydia, Syphilis, Diphtheria, Leprosy, Paratuberculosis, Tuberculosis, Lupus, Botulism, gangrene, tetanus, impetigo, Rheumatic Fever, Scarlet Fever, sexually transmitted diseases, skin diseases (e.g., cellulitis, dermatocycoses), toxemia, urinary tract infections, wound infections. Polynucleotides or polypeptides, agonists or antagonists of the invention, can be used to treat or detect any of these symptoms or diseases. In specific embodiments, Ppolynucleotides, polypeptides, agonists or antagonists of the invention are used to treat: tetanus, Diptheria, botulism, and/or meningitis type B.

[0763] Moreover, parasitic agents causing disease or symptoms that can be treated or detected by a polynucleotide or polypeptide and/or agonist or antagonist of the present invention include, but not limited to, the following families or class: Amebiasis, Babesiosis, Coccidiosis, Cryptosporidiosis, Dientamoebiasis, Dourine, Ectoparasitic, Giardiasis, Helminthiasis, Leishmaniasis, Theileriasis, Toxoplasmosis, Trypanosomiasis, and Trichomonas and Sporozoans (e.g., Plasmodium virax, Plasmodium falciparium, Plasmodium malariae and Plasmodium ovale). These parasites can cause a variety of diseases or symptoms, including, but not limited to: Scabies, Trombiculiasis, eye infections, intestinal disease (e.g., dysentery, giardiasis), liver disease, lung disease, opportunistic infections (e.g., AIDS related), malaria, pregnancy complications, and toxoplasmosis. polynucleotides or polypeptides, or agonists or antagonists of the invention, can be used to treat or detect any of these symptoms or diseases.

[0764] Polynucleotides or polypeptides, as well as agonists or antagonists of the present invention of the present invention could either be by administering an effective amount of a polypeptide to the patient, or by removing cells from the patient, supplying the cells with a polynucleotide of the present invention, and returning the engineered cells to the patient (ex vivo therapy). Moreover, the polypeptide or polynucleotide of the present invention can be used as an antigen in a vaccine to raise an immune response against infectious disease.

[0765] Regeneration

[0766] Polynucleotides or polypeptides, as well as agonists or antagonists of the present invention can be used to differentiate, proliferate, and attract cells, leading to the regeneration of tissues. (See, Science 276:59-87 (1997).) The regeneration of tissues could be used to repair, replace, or protect tissue damaged by congenital defects, trauma (wounds, burns, incisions, or ulcers), age, disease (e.g. osteoporosis, osteocarthritis, periodontal disease, liver failure), surgery, including cosmetic plastic surgery, fibrosis, reperfusion injury, or systemic cytokine damage.

[0767] Tissues that could be regenerated using the present invention include organs (e.g., pancreas, liver, intestine, kidney, skin, endothelium), muscle (smooth, skeletal or cardiac), vasculature (including vascular and lymphatics), nervous, hematopoietic, and skeletal (bone, cartilage, tendon, and ligament) tissue. Preferably, regeneration occurs without or decreased scarring. Regeneration also may include angiogenesis.

[0768] Moreover, polynucleotides or polypeptides, as well as agonists or antagonists of the present invention, may increase regeneration of tissues difficult to heal. For example, increased tendon/ligament regeneration would quicken recovery time after damage. Polynucleotides or polypeptides, as well as agonists or antagonists of the present invention could also be used prophylactically in an effort to avoid damage. Specific diseases that could be treated include of tendinitis, carpal tunnel syndrome, and other tendon or ligament defects. A further example of tissue regeneration of non-healing wounds includes pressure ulcers, ulcers associated with vascular insufficiency, surgical, and traumatic wounds.

[0769] Similarly, nerve and brain tissue could also be regenerated by using polynucleotides or polypeptides, as well as agonists or antagonists of the present invention, to proliferate and differentiate nerve cells. Diseases that could be treated using this method include central and peripheral nervous system diseases, neuropathies, or mechanical and traumatic disorders (e.g., spinal cord disorders, head trauma, cerebrovascular disease, and stoke). Specifically, diseases associated with peripheral nerve injuries, peripheral neuropathy (e.g., resulting from chemotherapy or other medical therapies), localized neuropathies, and central nervous system diseases (e.g., Alzheimer's disease, Parkinson's disease, Huntington's disease, amyotrophic lateral sclerosis, and Shy-Drager syndrome), could all be treated using the polynucleotides or polypeptides, as well as agonists or antagonists of the present invention.

[0770] Chemotaxis

[0771] Polynucleotides or polypeptides, as well as agonists or antagonists of the present invention may have chemotaxis activity. A chemotaxic molecule attracts or mobilizes cells (e.g., monocytes, fibroblasts, neutrophils, T-cells, mast cells, eosinophils, epithelial and/or endothelial cells) to a particular site in the body, such as inflammation, infection, or site of hyperproliferation. The mobilized cells can then fight off and/or heal the particular trauma or abnormality.

[0772] Polynucleotides or polypeptides, as well as agonists or antagonists of the present invention may increase chemotaxic activity of particular cells. These chemotactic molecules can then be used to treat inflammation, infection, hyperproliferative disorders, or any immune system disorder by increasing the number of cells targeted to a particular location in the body. For example, chemotaxic molecules can be used to treat wounds and other trauma to tissues by attracting immune cells to the injured location. Chemotactic molecules of the present invention can also attract fibroblasts, which can be used to treat wounds.

[0773] It is also contemplated that polynucleotides or polypeptides, as well as agonists or antagonists of the present invention may inhibit chemotactic activity. These molecules could also be used to treat disorders. Thus, polynucleotides or polypeptides, as well as agonists or antagonists of the present invention could be used as an inhibitor of chemotaxis.

[0774] Binding Activity

[0775] A polypeptide of the present invention may be used to screen for molecules that bind to the polypeptide or for molecules to which the polypeptide binds. The binding of the polypeptide and the molecule may activate (agonist), increase, inhibit (antagonist), or decrease activity of the polypeptide or the molecule bound. Examples of such molecules include antibodies, oligonucleotides, proteins (e.g., receptors),or small molecules.

[0776] Preferably, the molecule is closely related to the natural ligand of the polypeptide, e.g., a fragment of the ligand, or a natural substrate, a ligand, a structural or functional mimetic. (See, Coligan et al., Current Protocols in Immunology 1(2):Chapter 5 (1991).) Similarly, the molecule can be closely related to the natural receptor to which the polypeptide binds, or at least, a fragment of the receptor capable of being bound by the polypeptide (e.g., active site). In either case, the molecule can be rationally designed using known techniques.

[0777] Preferably, the screening for these molecules involves producing appropriate cells, which express the polypeptide. Preferred cells include cells from mammals, yeast, Drosophila, or E. coli. Cells expressing the polypeptide (or cell membrane containing the expressed polypeptide) are then preferably contacted with a test compound potentially containing the molecule to observe binding, stimulation, or inhibition of activity of either the polypeptide or the molecule.

[0778] The assay may simply test binding of a candidate compound to the polypeptide, wherein binding is detected by a label, or in an assay involving competition with a labeled competitor. Further, the assay may test whether the candidate compound results in a signal generated by binding to the polypeptide.

[0779] Alternatively, the assay can be carried out using cell-free preparations, polypeptide/molecule affixed to a solid support, chemical libraries, or natural product mixtures. The assay may also simply comprise the steps of mixing a candidate compound with a solution containing a polypeptide, measuring polypeptide/molecule activity or binding, and comparing the polypeptide/molecule activity or binding to a standard.

[0780] Preferably, an ELISA assay can measure polypeptide level or activity in a sample (e.g., biological sample) using a monoclonal or polyclonal antibody. The antibody can measure polypeptide level or activity by either binding, directly or indirectly, to the polypeptide or by competing with the polypeptide for a substrate.

[0781] Additionally, the receptor to which the polypeptide of the present invention binds can be identified by numerous methods known to those of skill in the art, for example, ligand panning and FACS sorting (Coligan, et al., Current Protocols in Immun., 1(2), Chapter 5, (1991)). For example, expression cloning is employed wherein polyadenylated RNA is prepared from a cell responsive to the polypeptides, for example, NIH3T3 cells which are known to contain multiple receptors for the FGF family proteins, and SC-3 cells, and a cDNA library created from this RNA is divided into pools and used to transfect COS cells or other cells that are not responsive to the polypeptides. Transfected cells which are grown on glass slides are exposed to the polypeptide of the present invention, after they have been labeled. The polypeptides can be labeled by a variety of means including iodination or inclusion of a recognition site for a site-specific protein kinase.

[0782] Following fixation and incubation, the slides are subjected to auto-radiographic analysis. Positive pools are identified and sub-pools are prepared and re-transfected using an iterative sub-pooling and re-screening process, eventually yielding a single clones that encodes the putative receptor.

[0783] As an alternative approach for receptor identification, the labeled polypeptides can be photoaffinity linked with cell membrane or extract preparations that express the receptor molecule. Cross-linked material is resolved by PAGE analysis and exposed to X-ray film. The labeled complex containing the receptors of the polypeptides can be excised, resolved into peptide fragments, and subjected to protein microsequencing. The amino acid sequence obtained from microsequencing would be used to design a set of degenerate oligonucleotide probes to screen a cDNA library to identify the genes encoding the putative receptors.

[0784] Moreover, the techniques of gene-shuffling, motif-shuffling, exon-shuffling, and/or codon-shuffling (collectively referred to as “DNA shuffling”) may be employed to modulate the activities of the polypeptide of the present invention thereby effectively generating agonists and antagonists of the polypeptide of the present invention. See generally, U.S. Pat. Nos. 5,605,793, 5,811,238, 5,830,721, 5,834,252, and 5,837,458, and Patten, P. A., et al., Curr. Opinion Biotechnol. 8:724-33 (1997); Harayama, S. Trends Biotechnol. 16(2):76-82 (1998); Hansson L. O., et al., J. Mol. Biol. 287:265-76 (1999); and Lorenzo, M. M. and Blasco, R. Biotechniques 24(2):308-13 (1998); each of these patents and publications are hereby incorporated by reference). In one embodiment, alteration of polynucleotides and corresponding polypeptides may be achieved by DNA shuffling. DNA shuffling involves the assembly of two or more DNA segments into a desired molecule by homologous, or site-specific, recombination. In another embodiment, polynucleotides and corresponding polypeptides may be altered by being subjected to random mutagenesis by error-prone PCR, random nucleotide insertion or other methods prior to recombination. In another embodiment, one or more components, motifs, sections, parts, domains, fragments, etc., of the polypeptide of the present invention may be recombined with one or more components, motifs, sections, parts, domains, fragments, etc. of one or more heterologous molecules. In preferred embodiments, the heterologous molecules are family members. In further preferred embodiments, the heterologous molecule is a growth factor such as, for example, platelet-derived growth factor (PDGF), insulin-like growth factor (IGF-I), transforming growth factor (TGF)-alpha, epidermal growth factor (EGF), fibroblast growth factor (FGF), TGF-beta, bone morphogenetic protein (BMP)-2, BMP-4, BMP-5, BMP-6, BMP-7, activins A and B, decapentaplegic(dpp), 60A, OP-2, dorsalin, growth differentiation factors (GDFs), nodal, MIS, inhibin-alpha, TGF-betal, TGF-beta2, TGF-beta3, TGF-beta5, and glial-derived neurotrophic factor (GDNF).

[0785] Other preferred fragments are biologically active fragments of the polypeptide of the present invention. Biologically active fragments are those exhibiting activity similar, but not necessarily identical, to an activity of the polypeptide of the present invention. The biological activity of the fragments may include an improved desired activity, or a decreased undesirable activity.

[0786] Additionally, this invention provides a method of screening compounds to identify those, which modulate the action of the polypeptide of the present invention. An example of such an assay comprises combining a mammalian fibroblast cell, the polypeptide of the present invention, the compound to be screened and ³[H] thymidine under cell culture conditions where the fibroblast cell would normally proliferate. A control assay may be performed in the absence of the compound to be screened and compared to the amount of fibroblast proliferation in the presence of the compound to determine if the compound stimulates proliferation by determining the uptake of ³[H] thymidine in each case. The amount of fibroblast cell proliferation is measured by liquid scintillation chromatography, which measures the incorporation of ³[H] thymidine. Both agonist and antagonist compounds may be identified by this procedure.

[0787] In another method, a mammalian cell or membrane preparation expressing a receptor for a polypeptide of the present invention is incubated with a labeled polypeptide of the present invention in the presence of the compound. The ability of the compound to enhance or block this interaction could then be measured. Alternatively, the response of a known second messenger system following interaction of a compound to be screened and the receptor is measured and the ability of the compound to bind to the receptor and elicit a second messenger response is measured to determine if the compound is a potential agonist or antagonist. Such second messenger systems include but are not limited to, cAMP guanylate cyclase, ion channels or phosphoinositide hydrolysis.

[0788] All of these above assays can be used as diagnostic or prognostic markers. The molecules discovered using these assays can be used to treat disease or to bring about a particular result in a patient (e.g., blood vessel growth) by activating or inhibiting the polypeptide/molecule. Moreover, the assays can discover agents which may inhibit or enhance the production of the polypeptides of the invention from suitably manipulated cells or tissues.

[0789] Therefore, the invention includes a method of identifying compounds which bind to a polypeptide of the invention comprising the steps of: (a) incubating a candidate binding compound with a polypeptide of the present invention; and (b) determining if binding has occurred. Moreover, the invention includes a method of identifying agonists/antagonists comprising the steps of: (a) incubating a candidate compound with a polypeptide of the present invention, (b) assaying a biological activity, and (b) determining if a biological activity of the polypeptide has been altered.

[0790] Targeted Delivery

[0791] In another embodiment, the invention provides a method of delivering compositions to targeted cells expressing a receptor for a polypeptide of the invention, or cells expressing a cell bound form of a polypeptide of the invention.

[0792] As discussed herein, polypeptides or antibodies of the invention may be associated with heterologous polypeptides, heterologous nucleic acids, toxins, or prodrugs via hydrophobic, hydrophilic, ionic and/or covalent interactions. In one embodiment, the invention provides a method for the specific delivery of compositions of the invention to cells by administering polypeptides of the invention (including antibodies) that are associated with heterologous polypeptides or nucleic acids. In one example, the invention provides a method for delivering a therapeutic protein into the targeted cell. In another example, the invention provides a method for delivering a single stranded nucleic acid (e.g., antisense or ribozymes) or double stranded nucleic acid (e.g., DNA that can integrate into the cell's genome or replicate episomally and that can be transcribed) into the targeted cell.

[0793] In another embodiment, the invention provides a method for the specific destruction of cells (e.g., the destruction of tumor cells) by administering polypeptides of the invention (e.g., polypeptides of the invention or antibodies of the invention) in association with toxins or cytotoxic prodrugs.

[0794] By “toxin” is meant compounds that bind and activate endogenous cytotoxic effector systems, radioisotopes, holotoxins, modified toxins, catalytic subunits of toxins, or any molecules or enzymes not normally present in or on the surface of a cell that under defined conditions cause the cell's death. Toxins that may be used according to the methods of the invention include, but are not limited to, radioisotopes known in the art, compounds such as, for example, antibodies (or complement fixing containing portions thereof) that bind an inherent or induced endogenous cytotoxic effector system, thymidine kinase, endonuclease, RNAse, alpha toxin, ricin, abrin, Pseudomonas exotoxin A, diphtheria toxin, saporin, momordin, gelonin, pokeweed antiviral protein, alpha-sarcin and cholera toxin. By “cytotoxic prodrug” is meant a non-toxic compound that is converted by an enzyme, normally present in the cell, into a cytotoxic compound. Cytotoxic prodrugs that may be used according to the methods of the invention include, but are not limited to, glutamyl derivatives of benzoic acid mustard alkylating agent, phosphate derivatives of etoposide or mitomycin C, cytosine arabinoside, daunorubisin, and phenoxyacetamide derivatives of doxorubicin.

[0795] Drug Screening

[0796] Further contemplated is the use of the polypeptides of the present invention, or the polynucleotides encoding these polypeptides, to screen for molecules, which modify the activities of the polypeptides of the present invention. Such a method would include contacting the polypeptide of the present invention with a selected compound(s) suspected of having antagonist or agonist activity, and assaying the activity of these polypeptides following binding.

[0797] This invention is particularly useful for screening therapeutic compounds by using the polypeptides of the present invention, or binding fragments thereof, in any of a variety of drug screening techniques. The polypeptide or fragrnent employed in such a test may be affixed to a solid support, expressed on a cell surface, free in solution, or located intracellularly. One method of drug screening utilizes eukaryotic or prokaryotic host cells which are stably transformed with recombinant nucleic acids expressing the polypeptide or fragment. Drugs are screened against such transformed cells in competitive binding assays. One may measure, for example, the formulation of complexes between the agent being tested and a polypeptide of the present invention.

[0798] Thus, the present invention provides methods of screening for drugs or any other agents, which affect activities mediated by the polypeptides of the present invention. These methods comprise contacting such an agent with a polypeptide of the present invention or a fragment thereof and assaying for the presence of a complex between the agent and the polypeptide or a fragment thereof, by methods well known in the art. In such a competitive binding assay, the agents to screen are typically labeled. Following incubation, free agent is separated from that present in bound form, and the amount of free or uncomplexed label is a measure of the ability of a particular agent to bind to the polypeptides of the present invention.

[0799] Another technique for drug screening provides high throughput screening for compounds having suitable binding affinity to the polypeptides of the present invention, and is described in great detail in European Patent Application 84/03564, published on Sep. 13, 1984, which is incorporated herein by reference herein. Briefly stated, large numbers of different small peptide test compounds are synthesized on a solid substrate, such as plastic pins or some other surface. The peptide test compounds are reacted with polypeptides of the present invention and washed. Bound polypeptides are then detected by methods well known in the art. Purified polypeptides are coated directly onto plates for use in the aforementioned drug screening techniques. In addition, non-neutralizing antibodies may be used to capture the peptide and immobilize it on the solid support.

[0800] This invention also contemplates the use of competitive drug screening assays in which neutralizing antibodies capable of binding polypeptides of the present invention specifically compete with a test compound for binding to the polypeptides or fragments thereof. In this manner, the antibodies are used to detect the presence of any peptide which shares one or more antigenic epitopes with a polypeptide of the invention.

[0801] Antisense and Ribozyme (Antagonists)

[0802] In specific embodiments, antagonists according to the present invention are nucleic acids corresponding to the sequences contained in SEQ ID NO:X, or the complementary strand thereof, and/or to cDNA sequences contained in cDNA Clone ID NO:Z identified for example, in Table 1A. In one embodiment, antisense sequence is generated internally, by the organism, in another embodiment, the antisense sequence is separately administered (see, for example, O'Connor, J., Neurochem. 56:560 (1991). Oligodeoxynucleotides as Antisense Inhibitors of Gene Expression, CRC Press, Boca Raton, Fla. (1988). Antisense technology can be used to control gene expression through antisense DNA or RNA, or through triple-helix formation. Antisense techniques are discussed for example, in Okano, J., Neurochem. 56:560 (1991); Oligodeoxynucleotides as Antisense Inhibitors of Gene Expression, CRC Press, Boca Raton, Fla. (1988). Triple helix formation is discussed in, for instance, Lee et al., Nucleic Acids Research 6:3073 (1979); Cooney et al., Science 241:456 (1988); and Dervan et al., Science 251:1300 (1991). The methods are based on binding of a polynucleotide to a complementary DNA or RNA.

[0803] For example, the use of c-myc and c-myb antisense RNA constructs to inhibit the growth of the non-lymphocytic leukemia cell line HL-60 and other cell lines was previously described. (Wickstrom et al. (1988); Anfossi et al. (1989)). These experiments were performed in vitro by incubating cells with the oligoribonucleotide. A similar procedure for in vivo use is described in WO 91/15580. Briefly, a pair of oligonucleotides for a given antisense RNA is produced as follows: A sequence complimentary to the first 15 bases of the open reading frame is flanked by an EcoRI site on the 5′ end and a HindIII site on the 3′ end. Next, the pair of oligonucleotides is heated at 90° C. for one minute and then annealed in 2×ligation buffer (20mM TRIS HCl pH 7.5, 10 mM MgCl₂, 10 MM dithiothreitol (DTT) and 0.2 mM ATP) and then ligated to the EcoR1/Hind III site of the retroviral vector PMV7 (WO 91/15580).

[0804] For example, the 5′ coding portion of a polynucleotide that encodes the polypeptide of the present invention may be used to design an antisense RNA oligonucleotide of from about 10 to 40 base pairs in length. A DNA oligonucleotide is designed to be complementary to a region of the gene involved in transcription thereby preventing transcription and the production of the receptor. The antisense RNA oligonucleotide hybridizes to the mRNA in vivo and blocks translation of the mRNA molecule into receptor polypeptide.

[0805] In one embodiment, the antisense nucleic acid of the invention is produced intracellularly by transcription from an exogenous sequence. For example, a vector or a portion thereof, is transcribed, producing an antisense nucleic acid (RNA) of the invention. Such a vector would contain a sequence encoding the antisense nucleic acid. Such a vector can remain episomal or become chromosomally integrated, as long as it can be transcribed to produce the desired antisense RNA. Such vectors can be constructed by recombinant DNA technology methods standard in the art. Vectors can be plasmid, viral, or others known in the art, used for replication and expression in vertebrate cells. Expression of the sequence encoding the polypeptide of the present invention or fragments thereof, can be by any promoter known in the art to act in vertebrate, preferably human cells. Such promoters can be inducible or constitutive. Such promoters include, but are not limited to, the SV40 early promoter region (Bemoist and Chambon, Nature 29:304-310 (1981), the promoter contained in the 3′ long terminal repeat of Rous sarcoma virus (Yamamoto et al., Cell 22:787-797 (1980), the herpes thymidine promoter (Wagner et al., Proc. Natl. Acad. Sci. U.S.A. 78:1441-1445 (1981), the regulatory sequences of the metallothionein gene (Brinster, et al., Nature 296:39-42 (1982)), etc.

[0806] The antisense nucleic acids of the invention comprise a sequence complementary to at least a portion of an RNA transcript of a gene of the present invention. However, absolute complementarity, although preferred, is not required. A sequence “complementary to at least a portion of an RNA,” referred to herein, means a sequence having sufficient complementarity to be able to hybridize with the RNA, forming a stable duplex; in the case of double stranded antisense nucleic acids, a single strand of the duplex DNA may thus be tested, or triplex formation may be assayed. The ability to hybridize will depend on both the degree of complementarity and the length of the antisense nucleic acid. Generally, the larger the hybridizing nucleic acid, the more base mismatches with a RNA it may contain and still form a stable duplex (or triplex as the case may be). One skilled in the art can ascertain a tolerable degree of mismatch by use of standard procedures to determine the melting point of the hybridized complex.

[0807] Oligonucleotides that are complementary to the 5′ end of the message, e.g., the 5′ untranslated sequence up to and including the AUG initiation codon, should work most efficiently at inhibiting translation. However, sequences complementary to the 3′ untranslated sequences of mRNAs have been shown to be effective at inhibiting translation of mRNAs as well. See generally, Wagner, R., 1994, Nature 372:333-335. Thus, oligonucleotides complementary to either the 5′- or 3′-non-translated, non-coding regions of polynucleotide sequences described herein could be used in an antisense approach to inhibit translation of endogenous mRNA. Oligonucleotides complementary to the 5′ untranslated region of the mRNA should include the complement of the AUG start codon. Antisense oligonucleotides complementary to mRNA coding regions are less efficient inhibitors of translation but could be used in accordance with the invention. Whether designed to hybridize to the 5′-, 3′- or coding region of mRNA of the present invention, antisense nucleic acids should be at least six nucleotides in length, and are preferably oligonucleotides ranging from 6 to about 50 nucleotides in length. In specific aspects the oligonucleotide is at least 10 nucleotides, at least 17 nucleotides, at least 25 nucleotides or at least 50 nucleotides.

[0808] The polynucleotides of the invention can be DNA or RNA or chimeric mixtures or derivatives or modified versions thereof, single-stranded or double-stranded. The oligonucleotide can be modified at the base moiety, sugar moiety, or phosphate backbone, for example, to improve stability of the molecule, hybridization, etc. The oligonucleotide may include other appended groups such as peptides (e.g., for targeting host cell receptors in vivo), or agents facilitating transport across the cell membrane (see, e.g., Letsinger et al., 1989, Proc. Natl. Acad. Sci. U.S.A. 86:6553-6556; Lemaitre et al., 1987, Proc. Natl. Acad. Sci. 84:648-652; PCT Publication No. WO88/09810, published Dec. 15, 1988) or the blood-brain barrier (see, e.g., PCT Publication No. WO89/10134, published Apr. 25, 1988), hybridization-triggered cleavage agents. (See, e.g., Krol et al., 1988, BioTechniques 6:958-976) or intercalating agents. (See, e.g., Zon, 1988, Pharm. Res. 5:539-549). To this end, the oligonucleotide may be conjugated to another molecule, e.g., a peptide, hybridization triggered cross-linking agent, transport agent, hybridization-triggered cleavage agent, etc.

[0809] The antisense oligonucleotide may comprise at least one modified base moiety which is selected from the group including, but not limited to, 5-fluorouracil, 5-bromouracil, 5-chlorouracil, 5-iodouracil, hypoxanthine, xantine, 4-acetylcytosine, 5-(carboxyhydroxylmethyl) uracil, 5-carboxymethylaminomethyl-2-thiouridine, 5-carboxymethylaminomethyluracil, dihydrouracil, beta-D-galactosylqueosine, inosine, N6-isopentenyladenine, 1-methylguanine, 1-methylinosine, 2,2-dimethylguanine, 2-methyladenine, 2-methylguanine, 3-methylcytosine, 5-methylcytosine, N6-adenine, 7-methylguanine, 5-methylaminomethyluracil, 5-methoxyaminomethyl-2-thiouracil, beta-D-mannosylqueosine, 5′-methoxycarboxymethyluracil, 5-methoxyuracil, 2-methylthio-N6-isopentenyladenine, uracil-5-oxyacetic acid (v), wybutoxosine, pseudouracil, queosine, 2-thiocytosine, 5-methyl-2-thiouracil, 2-thiouracil, 4-thiouracil, 5-methyluracil, uracil-5-oxyacetic acid methylester, uracil-5-oxyacetic acid (v), 5-methyl-2-thiouracil, 3-(3-amino-3-N-2-carboxypropyl) uracil, (acp3)w, and 2,6-diaminopurine.

[0810] The antisense oligonucleotide may also comprise at least one modified sugar moiety selected from the group including, but not limited to, arabinose, 2-fluoroarabinose, xylulose, and hexose.

[0811] In yet another embodiment, the antisense oligonucleotide comprises at least one modified phosphate backbone selected from the group including, but not limited to, a phosphorothioate, a phosphorodithioate, a phosphoramidothioate, a phosphoramidate, a phosphordiamidate, a methylphosphonate, an alkyl phosphotriester, and a formacetal or analog thereof.

[0812] In yet another embodiment, the antisense oligonucleotide is an a-anomeric oligonucleotide. An a-anomeric oligonucleotide forms specific double-stranded hybrids with complementary RNA in which, contrary to the usual b-units, the strands run parallel to each other (Gautier et al., 1987, Nucl. Acids Res. 15:6625-6641). The oligonucleotide is a 2′-0-methylribonucleotide (Inoue et al., 1987, Nucl. Acids Res. 15:6131-6148), or a chimeric RNA-DNA analogue (Inoue et al., 1987, FEBS Lett. 215:327-330).

[0813] Polynucleotides of the invention may be synthesized by standard methods known in the art, e.g. by use of an automated DNA synthesizer (such as are commercially available from Biosearch, Applied Biosystems, etc.). As examples, phosphorothioate oligonucleotides may be synthesized by the method of Stein et al. (1988, Nucl. Acids Res. 16:3209), methylphosphonate oligonucleotides can be prepared by use of controlled pore glass polymer supports (Sarin et al., 1988, Proc. Natl. Acad. Sci. U.S.A. 85:7448-7451), etc.

[0814] While antisense nucleotides complementary to the coding region sequence could be used, those complementary to the transcribed untranslated region are most preferred.

[0815] Potential antagonists according to the invention also include catalytic RNA, or a ribozyme (See, e.g., PCT International Publication WO 90/11364, published Oct. 4, 1990; Sarver et al, Science 247:1222-1225 (1990). While ribozymes that cleave mRNA at site specific recognition sequences can be used to destroy mRNAs, the use of hammerhead ribozymes is preferred. Hammerhead ribozymes cleave mRNAs at locations dictated by flanking regions that form complementary base pairs with the target mRNA. The sole requirement is that the target mRNA have the following sequence of two bases: 5′-UG-3′. The construction and production of hammerhead ribozymes is well known in the art and is described more fully in Haseloff and Gerlach, Nature 334:585-591 (1988). There are numerous potential hammerhead ribozyme cleavage sites within the nucteotide sequence of SEQ ID NO:X. Preferably, the ribozyme is engineered so that the cleavage recognition site is located near the 5′ end of the mRNA; i.e., to increase efficiency and minimize the intracellular accumulation of non-functional mRNA transcripts.

[0816] As in the antisense approach, the ribozymes of the invention can be composed of modified oligonucleotides (e.g. for improved stability, targeting, etc.) and should be delivered to cells which express in vivo. DNA constructs encoding the ribozyme may be introduced into the cell in the same manner as described above for the introduction of antisense encoding DNA. A preferred method of delivery involves using a DNA construct “encoding” the ribozyme under the control of a strong constitutive promoter, such as, for example, pol III or pol II promoter, so that transfected cells will produce sufficient quantities of the ribozyme to destroy endogenous messages and inhibit translation. Since ribozymes unlike antisense molecules, are catalytic, a lower intracellular concentration is required for efficiency.

[0817] Antagonist/agonist compounds may be employed to inhibit the cell growth and proliferation effects of the polypeptides of the present invention on neoplastic cells and tissues, i.e. stimulation of angiogenesis of tumors, and, therefore, retard or prevent abnormal cellular growth and proliferation, for example, in tumor formation or growth.

[0818] The antagonist/agonist may also be employed to prevent hyper-vascular diseases, and prevent the proliferation of epithelial lens cells after extracapsular cataract surgery. Prevention of the mitogenic activity of the polypeptides of the present invention may also be desirous in cases such as restenosis after balloon angioplasty.

[0819] The antagonist/agonist may also be employed to prevent the growth of scar tissue during wound healing.

[0820] The antagonist/agonist may also be employed to treat the diseases described herein.

[0821] Thus, the invention provides a method of treating disorders or diseases, including but not limited to the disorders or diseases listed throughout this application, associated with overexpression of a polynucleotide of the present invention by administering to a patient (a) an antisense molecule directed to the polynucleotide of the present invention, and/or (b) a ribozyme directed to the polynucleotide of the present invention.

[0822] Binding Peptides and Other Molecules

[0823] The invention also encompasses screening methods for identifying polypeptides and nonpolypeptides that bind colorectal cancer antigen polypeptides, and the colorectal cancer antigen binding molecules identified thereby. These binding molecules are useful, for example, as agonists and antagonists of the colorectal cancer antigen polypeptides. Such agonists and antagonists can be used, in accordance with the invention, in the therapeutic embodiments described in detail, below.

[0824] This method comprises the steps of:

[0825] contacting colorectal cancer antigen polypeptides or colorectal cancer antigen-like polypeptides with a plurality of molecules; and

[0826] identifying a molecule that binds the colorectal cancer antigen polypeptides or colorectal cancer antigen-like polypeptides.

[0827] The step of contacting the colorectal cancer antigen polypeptides or colorectal cancer antigen-like polypeptides with the plurality of molecules may be effected in a number of ways. For example, one may contemplate immobilizing the colorectal cancer antigen polypeptides or colorectal cancer antigen-like polypeptides on a solid support and bringing a solution of the plurality of molecules in contact with the immobilized colorectal cancer antigen polypeptides or colorectal cancer antigen-like polypeptides. Such a procedure would be akin to an affinity chromatographic process, with the affinity matrix being comprised of the immobilized colorectal cancer antigen polypeptides or colorectal cancer antigen-like polypeptides. The molecules having a selective affinity for the colorectal cancer antigen polypeptides or colorectal cancer antigen-like polypeptides can then be purified by affinity selection. The nature of the solid support, process for attachment of the colorectal cancer antigen polypeptides or colorectal cancer antigen-like polypeptides to the solid support, solvent, and conditions of the affinity isolation or selection are largely conventional and well known to those of ordinary skill in the art.

[0828] Alternatively, one may also separate a plurality of polypeptides into substantially separate fractions comprising a subset of or individual polypeptides. For instance, one can separate the plurality of polypeptides by gel electrophoresis, column chromatography, or like method known to those of ordinary skill for the separation of polypeptides. The individual polypeptides can also be produced by a transformed host cell in such a way as to be expressed on or about its outer surface (e.g., a recombinant phage). Individual isolates can then be “probed” by the colorectal cancer antigen polypeptides or colorectal cancer antigen-like polypeptides, optionally in the presence of an inducer should one be required for expression, to determine if any selective affinity interaction takes place between the colorectal cancer antigen polypeptides or colorectal cancer antigen-like polypeptides and the individual clone. Prior to contacting the colorectal cancer antigen polypeptides or colorectal cancer antigen-like polypeptides with each fraction comprising individual polypeptides, the polypeptides could first be transferred to a solid support for additional convenience. Such a solid support may simply be a piece of filter membrane, such as one made of nitrocellulose or nylon. In this manner, positive clones could be identified from a collection of transformed host cells of an expression library, which harbor a DNA construct encoding a polypeptide having a selective affinity for colorectal cancer antigen polypeptides or colorectal cancer antigen-like polypeptides. Furthermore, the amino acid sequence of the polypeptide having a selective affinity for the colorectal cancer antigen polypeptides or colorectal cancer antigen-like polypeptides can be determined directly by conventional means or the coding sequence of the DNA encoding the polypeptide can frequently be determined more conveniently. The primary sequence can then be deduced from the corresponding DNA sequence. If the amino acid sequence is to be determined from the polypeptide itself, one may use microsequencing techniques. The sequencing technique may include mass spectroscopy.

[0829] In certain situations, it may be desirable to wash away any unbound colorectal cancer antigen polypeptides or colorectal cancer antigen-like polypeptides, or alternatively, unbound polypeptides, from a mixture of the colorectal cancer antigen polypeptides or colorectal cancer antigen-like polypeptides and the plurality of polypeptides prior to attempting to determine or to detect the presence of a selective affinity interaction. Such a wash step may be particularly desirable when the colorectal cancer antigen polypeptides or colorectal cancer antigen-like polypeptides or the plurality of polypeptides is bound to a solid support.

[0830] The plurality of molecules provided according to this method may be provided by way of diversity libraries, such as random or combinatorial peptide or nonpeptide libraries which can be screened for molecules that specifically bind colorectal cancer antigen polypeptides. Many libraries are known in the art that can be used, e.g., chemically synthesized libraries, recombinant (e.g., phage display libraries), and in vitro translation-based libraries. Examples of chemically synthesized libraries are described in Fodor et al., 1991, Science 251:767-773; Houghten et al., 1991, Nature 354:84-86; Lam et al., 1991, Nature 354:82-84; Medynski, 1994, Bio/Technology 12:709-710;Gallop et al., 1994, J. Medicinal Chemistry 37(9):1233-1251; Ohlmeyer et al., 1993, Proc. Natl. Acad. Sci. USA 90:10922-10926; Erb et al., 1994, Proc. Natl. Acad. Sci. USA 91:11422-11426; Houghten et al., 1992, Biotechniques 13:412; Jayawickreme et al., 1994, Proc. Natl. Acad. Sci. USA 91:1614-1618; Salmon et al., 1993, Proc. Natl. Acad. Sci. USA 90:11708-11712; PCT Publication No. WO 93/20242; and Brenner and Lerner, 1992, Proc. Natl. Acad. Sci. USA 89:5381-5383.

[0831] Examples of phage display libraries are described in Scott and Smith, 1990, Science 249:386-390; Devlin et al., 1990, Science, 249:404-406; Christian, R. B., et al., 1992, J. Mol. Biol. 227:711-718); Lenstra, 1992, J. Immunol. Meth. 152:149-157; Kay et al., 1993, Gene 128:59-65; and PCT Publication No. WO 94/18318 dated Aug. 18, 1994.

[0832] In vitro translation-based libraries include but are not limited to those described in PCT Publication No. WO 91/05058 dated Apr. 18, 1991; and Mattheakis et al., 1994, Proc. Natl. Acad. Sci. USA 91:9022-9026.

[0833] By way of examples of nonpeptide libraries, a benzodiazepine library (see e.g., Bunin et al., 1994, Proc. Natl. Acad. Sci. USA 91:4708-4712) can be adapted for use. Peptoid libraries (Simon et al., 1992, Proc. Natl. Acad. Sci. USA 89:9367-9371) can also be used. Another example of a library that can be used, in which the amide functionalities in peptides have been permethylated to generate a chemically transformed combinatorial library, is described by Ostresh et at. (1994, Proc. Natl. Acad. Sci. USA 91:11138-11142).

[0834] The variety of non-peptide libraries that are useful in the present invention is great. For example, Ecker and Crooke, 1995, Bio/Technology 13:351-360 list benzodiazepines, hydantoins, piperazinediones, biphenyls, sugar analogs, beta-mercaptoketones, arylacetic acids, acylpiperidines, benzopyrans, cubanes, xanthines, aminimides, and oxazolones as among the chemical species that form the basis of various libraries.

[0835] Non-peptide libraries can be classified broadly into two types: decorated monomers and oligomers. Decorated monomer libraries employ a relatively simple scaffold structure upon which a variety functional groups is added. Often the scaffold will be a molecule with a known useful pharmacological activity. For example, the scaffold might be the benzodiazepine structure.

[0836] Non-peptide oligomer libraries utilize a large number of monomers that are assembled together in ways that create new shapes that depend on the order of the monomers. Among the monomer units that have been used are carbamates, pyrrolinones, and morpholinos. Peptoids, peptide-like oligomers in which the side chain is attached to the alpha amino group rather than the alpha carbon, form the basis of another version of non-peptide oligomer libraries. The first non-peptide oligomer libraries utilized a single type of monomer and thus contained a repeating backbone. Recent libraries have utilized more than one monomer, giving the libraries added flexibility.

[0837] Screening the libraries can be accomplished by any of a variety of commonly known methods. See, e.g., the following references, which disclose screening of peptide libraries: Parmley and Smith, 1989, Adv. Exp. Med. Biol. 251:215-218; Scott and Smith, 1990, Science 249:386-390; Fowlkes et al., 1992; BioTechniques 13:422-427; Oldenburg et al., 1992, Proc. Natl. Acad. Sci. USA 89:5393-5397; Yu et al., 1994, Cell 76:933-945; Staudt et al., 1988, Science 241:577-580; Bock et al., 1992, Nature 355:564-566; Tuerk et al., 1992, Proc. Natl. Acad. Sci. USA 89:6988-6992; Ellington et al., 1992, Nature 355:850-852; U.S. Pat. No. 5,096,815, U.S. Pat. No. 5,223,409, and U.S. Pat. No. 5,198,346, all to Ladner et al.; Rebar and Pabo, 1993, Science 263:671-673; and CT Publication No. WO 94/18318.

[0838] In a specific embodiment, screening to identify a molecule that binds colorectal cancer antigen polypeptides can be carried out by contacting the library members with a colorectal cancer antigen polypeptides or colorectal cancer antigen-like polypeptides immobilized on a solid phase and harvesting those library members that bind to the colorectal cancer antigen polypeptides or colorectal cancer antigen-like polypeptides. Examples of such screening methods, termed “panning” techniques are described by way of example in Parmley and Smith, 1988, Gene 73:305-318; FowLkes et al., 1992, BioTechniques 13:422-427; International Publication No. WO 94/18318; and in references cited herein.

[0839] In another embodiment, the two-hybrid system for selecting interacting proteins in yeast (Fields and Song, 1989, Nature 340:245-246; Chien et al., 1991, Proc. Natl. Acad. Sci. USA 88:9578-9582) can be used to identify molecules that specifically bind to colorectal cancer antigen polypeptides or colorectal cancer antigen-like polypeptides.

[0840] Where the colorectal cancer antigen binding molecule is a polypeptide, the polypeptide can be conveniently selected from any peptide library, including random peptide libraries, combinatorial peptide libraries, or biased peptide libraries. The term “biased” is used herein to mean that the method of generating the library is manipulated so as to restrict one or more parameters that govern the diversity of the resulting collection of molecules, in this case peptides.

[0841] Thus, a truly random peptide library would generate a collection of peptides in which the probability of finding a particular amino acid at a given position of the peptide is the same for all 20 amino acids. A bias can be introduced into the library, however, by specifying, for example, that a lysine occurs every fifth amino acid or that positions 4, 8, and 9 of a decapeptide library be fixed to include only arginine. Clearly, many types of biases can be contemplated, and the present invention is not restricted to any particular bias. Furthermore, the present invention contemplates specific types of peptide libraries, such as phage displayed peptide libraries and those that utilize a DNA construct comprising a lambda phage vector with a DNA insert.

[0842] As mentioned above, in the case of a colorectal cancer antigen binding molecule that is a polypeptide, the polypeptide may have about 6 to less than about 60 amino acid residues, preferably about 6 to about 10 amino acid residues, and most preferably, about 6 to about 22 amino acids. In another embodiment, a colorectal cancer antigen binding polypeptide has in the range of 15-100 amino acids, or 20-50 amino acids.

[0843] The selected colorectal cancer antigen binding polypeptide can be obtained by chemical synthesis or recombinant expression.

[0844] Other Activities

[0845] A polypeptide, polynucleotide, agonist, or antagonist of the present invention, as a result of the ability to stimulate vascular endothelial cell growth, may be employed in treatment for stimulating re-vascularization of ischemic tissues due to various disease conditions such as thrombosis, arteriosclerosis, and other cardiovascular conditions. The polypeptide, polynucleotide, agonist, or antagonist of the present invention may also be employed to stimulate angiogenesis and limb regeneration, as discussed above.

[0846] A polypeptide, polynucleotide, agonist, or antagonist of the present invention may also be employed for treating wounds due to injuries, bums, post-operative tissue repair, and ulcers since they are mitogenic to various cells of different origins, such as fibroblast cells and skeletal muscle cells, and therefore, facilitate the repair or replacement of damaged or diseased tissue.

[0847] A polypeptide, polynucleotide, agonist, or antagonist of the present invention may also be employed to stimulate neuronal growth and to treat and prevent neuronal damage which occurs in certain neuronal disorders or neuro-degenerative conditions such as Alzheimer's disease, Parkinson's disease, and AIDS-related complex. A polypeptide, polynucleotide, agonist, or antagonist of the present invention may have the ability to stimulate chondrocyte growth; therefore, they may be employed to enhance bone and periodontal regeneration and aid in tissue transplants or bone grafts.

[0848] A polypeptide, polynucleotide, agonist, or antagonist of the present invention may be also employed to prevent skin aging due to sunburn by stimulating keratinocyte growth.

[0849] A polypeptide, polynucleotide, agonist, or antagonist of the present invention may also be employed for preventing hair loss, since FGF family members activate hair-forming cells and promotes melanocyte growth. Along the same lines, a polypeptide, polynucleotide, agonist, or antagonist of the present invention may be employed to stimulate growth and differentiation of hematopoietic cells and bone marrow cells when used in combination with other cytokines.

[0850] A polypeptide, polynucleotide, agonist, or antagonist of the present invention may also be employed to maintain organs before transplantation or for supporting cell culture of primary tissues. A polypeptide, polynucleotide, agonist, or antagonist of the present invention may also be employed for inducing tissue of mesodermal origin to differentiate in early embryos.

[0851] A polypeptide, polynucleotide, agonist, or antagonist of the present invention may also increase or decrease the differentiation or proliferation of embryonic stem cells, besides, as discussed above, hematopoietic lineage.

[0852] A potypeptide, polynucleotide, agonist, or antagonist of the present invention may also be used to modulate mammalian characteristics, such as body height, weight, hair color, eye color, skin, percentage of adipose tissue, pigmentation, size, and shape (e.g., cosmetic surgery). Similarly, a polypeptide, polynucleotide, agonist, or antagonist of the present invention may be used to modulate mammalian metabolism affecting catabolism, anabolism, processing, utilization, and storage of energy.

[0853] A polypeptide, polynucleotide, agonist, or antagonist of the present invention may be used to change a mammal's mental state or physical state by influencing biorhythms, caricadic rhythms, depression (including depressive disorders), tendency for violence, tolerance for pain, reproductive capabilities (preferably by Activin or Inhibin-like activity), hormonal or endocrine levels, appetite, libido, memory, stress, or other cognitive qualities.

[0854] A polypeptide, polynucleotide, agonist, or antagonist of the present invention may also be used as a food additive or preservative, such as to increase or decrease storage capabilities, fat content, lipid, protein, carbohydrate, vitamins, minerals, cofactors or other nutritional components.

[0855] The above-recited applications have uses in a wide variety of hosts. Such hosts include, but are not limited to, human, murine, rabbit, goat, guinea pig, camel, horse, mouse, rat, hamster, pig, micro-pig, chicken, goat, cow, sheep, dog, cat, non-human primate, and human. In specific embodiments, the host is a mouse, rabbit, goat, guinea pig, chicken, rat, hamster, pig, sheep, dog or cat. In preferred embodiments, the host is a mammal. In most preferred embodiments, the host is a human.

[0856] Other Preferred Embodiments

[0857] Other preferred embodiments of the claimed invention include an isolated nucleic acid molecule comprising a nucleotide sequence which is at least 95% identical to a sequence of at least about 50 contiguous nucleotides in the nucleotide sequence of SEQ ID NO:X or the complementary strand thereto, the nucleotide sequence as defined in column 4 of Table 1A or columns 8 and 9 of Table 2 or the complementary strand thereto, and/or cDNA contained in Clone ID NO:Z.

[0858] Also preferred is a nucleic acid molecule wherein said sequence of contiguous nucleotides is included in the nucleotide sequence of the portion of SEQ ID NO:X as defined in column 4, “ORF (From-To)”, in Table 1A.

[0859] Also preferred is a nucleic acid molecule wherein said sequence of contiguous nucleotides is included in the nucleotide sequence of the portion of SEQ ID NO:X as defined in columns 8 and 9, “NT From” and “NT To” respectively, in Table 2.

[0860] Also preferred is an isolated nucleic acid molecule comprising a nucleotide sequence which is at least 95% identical to a sequence of at least about 150 contiguous nucleotides in the nucleotide sequence of SEQ ID NO:X or the complementary strand thereto, the nucleotide sequence as defined in column 4 of Table 1A or columns 8 and 9 of Table 2 or the complementary strand thereto, and/or cDNA contained in Clone ID NO:Z.

[0861] Further preferred is an isolated nucleic acid molecule comprising a nucleotide sequence which is at least 95% identical to a sequence of at least about 500 contiguous nucleotides in the nucleotide sequence of SEQ ID NO:X or the complementary strand thereto, the nucleotide sequence as defined in column 4 of Table 1A or columns 8 and 9 of Table 2 or the complementary strand thereto, and/or cDNA contained in Clone ID NO:Z.

[0862] A further preferred embodiment is a nucleic acid molecule comprising a nucleotide sequence which is at least 95% identical to the nucleotide sequence of the portion of SEQ ID NO:X defined in column 4, “ORF (From-To)”, in Table 1A.

[0863] A further preferred embodiment is a nucleic acid molecule comprising a nucleotide sequence which is at least 95% identical to the nucleotide sequence of the portion of SEQ ID NO:X defined in columns 8 and 9, “NT From” and “NT To”, respectively, in Table 2.

[0864] A further preferred embodiment is an isolated nucleic acid molecule comprising a nucleotide sequence which is at least 95% identical to the complete nucleotide sequence of SEQ ID NO:X or the complementary strand thereto, the nucleotide sequence as defined in column 4 of Table 1A or columns 8 and 9 of Table 2 or the complementary strand thereto, and/or cDNA contained in Clone ID NO:Z.

[0865] Also preferred is an isolated nucleic acid molecule which hybridizes under stringent hybridization conditions to a nucleic acid molecule comprising a nucleotide sequence of SEQ ID NO:X or the complementary strand thereto, the nucleotide sequence as defined in column 4 of Table 1A or columns 8 and 9 of Table 2 or the complementary strand thereto, and/or cDNA contained in Clone ID NO:Z, wherein said nucleic acid molecule which hybridizes does not hybridize under stringent hybridization conditions to a nucleic acid molecule having a nucleotide sequence consisting of only A residues or of only T residues.

[0866] Also preferred is a composition of matter comprising a DNA molecule which comprises the cDNA contained in Clone ID NO:Z.

[0867] Also preferred is an isolated nucleic acid molecule comprising a nucleotide sequence which is at least 95% identical to a sequence of at least 50 contiguous nucleotides of the cDNA sequence contained in Clone ID NO:Z.

[0868] Also preferred is an isolated nucleic acid molecule, wherein said sequence of at least 50 contiguous nucleotides is included in the nucleotide sequence of an open reading frame sequence encoded by cDNA contained in Clone ID NO:Z.

[0869] Also preferred is an isolated nucleic acid molecule comprising a nucleotide sequence which is at least 95% identical to sequence of at least 150 contiguous nucleotides in the nucleotide sequence encoded by cDNA contained in Clone ID NO:Z.

[0870] A further preferred embodiment is an isolated nucleic acid molecule comprising a nucleotide sequence which is at least 95% identical to sequence of at least 500 contiguous nucleotides in the nucleotide sequence encoded by cDNA contained in Clone ID NO:Z.

[0871] A further preferred embodiment is an isolated nucleic acid molecule comprising a nucleotide sequence which is at least 95% identical to the complete nucleotide sequence encoded by cDNA contained in Clone ID NO:Z.

[0872] A further preferred embodiment is a method for detecting in a biological sample a nucleic acid molecule comprising a nucleotide sequence which is at least 95% identical to a sequence of at least 50 contiguous nucleotides in a sequence selected from the group consisting of a nucleotide sequence of SEQ ID NO:X or the complementary strand thereto; the nucleotide sequence as defined in column 4 of Table 1A or columns 8 and 9 of Table 2 or the complementary strand thereto; and a nucleotide sequence encoded by cDNA contained in Clone ID NO:Z; which method comprises a step of comparing a nucleotide sequence of at least one nucleic acid molecule in said sample with a sequence selected from said group and determining whether the sequence of said nucleic acid molecule in said sample is at least 95% identical to said selected sequence.

[0873] Also preferred is the above method wherein said step of comparing sequences comprises determining the extent of nucleic acid hybridization between nucleic acid molecules in said sample and a nucleic acid molecule comprising said sequence selected from said group. Similarly, also preferred is the above method wherein said step of comparing sequences is performed by comparing the nucleotide sequence determined from a nucleic acid molecule in said sample with said sequence selected from said group. The nucleic acid molecules can comprise DNA molecules or RNA molecules.

[0874] A further preferred embodiment is a method for identifying the species, tissue or cell type of a biological sample which method comprises a step of detecting nucleic acid molecules in said sample, if any, comprising a nucleotide sequence that is at least 95% identical to a sequence of at least 50 contiguous nucleotides in a sequence selected from the group consisting of: a nucleotide sequence of SEQ ID NO:X or the complementary strand thereto; the nucleotide sequence as defined in column 4 of Table 1A or columns 8 and 9 of Table 2 or the complementary strand thereto; and a nucleotide sequence of the cDNA contained in Clone ID NO:Z.

[0875] The method for identifying the species, tissue or cell type of a biological sample can comprise a step of detecting nucleic acid molecules comprising a nucleotide sequence in a panel of at least two nucleotide sequences, wherein at least one sequence in said panel is at least 95% identical to a sequence of at least 50 contiguous nucleotides in a sequence selected from said group.

[0876] Also preferred is a method for diagnosing in a subject a pathological condition associated with abnormal structure or expression of a nucleotide sequence of SEQ ID NO:X or the complementary strand thereto; the nucleotide sequence as defined in column 4 of Table 1A or columns 8 and 9 of Table 2 or the complementary strand thereto; or the cDNA contained in Clone ID NO:Z which encodes a protein, wherein the method comprises a step of detecting in a biological sample obtained from said subject nucleic acid molecules, if any, comprising a nucleotide sequence that is at least 95% identical to a sequence of at least 50 contiguous nucleotides in a sequence selected from the group consisting of a nucleotide sequence of SEQ ID NO:X or the complementary strand thereto; the nucleotide sequence as defined in column 4 of Table 1A or columns 8 and 9 of Table 2 or the complementary strand thereto; and a nucleotide sequence of cDNA contained in Clone ID NO:Z.

[0877] The method for diagnosing a pathological condition can comprise a step of detecting nucleic acid molecules comprising a nucleotide sequence in a pane of at least two nucleotide sequences, wherein at least one sequence in said panel is at least 95% identical to a sequence of at least 50 contiguous nucleotides in a sequence selected from said group.

[0878] Also preferred is a composition of matter comprising isolated nucleic acid molecules wherein the nucleotide sequences of said nucleic acid molecules comprise a panel of at least two nucleotide sequences, wherein at least one sequence in said panel is at least 95% identical to a sequence of at least 50 contiguous nucleotides in a sequence selected from the group consisting of: a nucleotide sequence of SEQ ID NO:X or the complementary strand thereto; the nucleotide sequence as defined in column 4 of Table 1A or columns 8 and 9 of Table 2 or the complementary strand thereto; and a nucleotide sequence encoded by cDNA contained in Clone ID NO:Z. The nucleic acid molecules can comprise DNA molecules or RNA molecules.

[0879] Also preferred is a composition of matter comprising isolated nucleic acid molecules wherein the nucleotide sequences of said nucleic acid molecules comprise a DNA microarray or “chip” of at least 1, 2, 3, 4, 5, 6, 7, 8, 9, 10, 15, 20, 25, 30, 40, 50, 100, 150, 200, 250, 300, 500, 1000, 2000, 3000, or 4000 nucleotide sequences, wherein at least one sequence in said DNA microarray or “chip” is at least 95% identical to a sequence of at least 50 contiguous nucleotides in a sequence selected from the group consisting of: a nucleotide sequence of SEQ ID NO:X wherein X is any integer as defined in Table 1A; and a nucleotide sequence encoded by a human cDNA clone identified by a cDNA “Clone ID” in Table 1A.

[0880] Also preferred is an isolated polypeptide comprising an amino acid sequence at least 90% identical to a sequence of at least about 10 contiguous amino acids in the polypeptide sequence of SEQ ID NO:Y; a polypeptide encoded by SEQ ID NO:X or the complementary strand thereto; the polypeptide encoded by the nucleotide sequence as defined in columns 8 and 9 of Table 2; and/or a polypeptide encoded by cDNA contained in Clone ID NO:Z.

[0881] Also preferred is an isolated polypeptide comprising an amino acid sequence at least 95% identical to a sequence of at least about 30 contiguous amino acids in the amino acid sequence of SEQ ID NO:Y; a polypeptide encoded by SEQ ID NO:X or the complementary strand thereto; the polypeptide encoded by the nucleotide sequence as defined in columns 8 and 9 of Table 2; and/or a polypeptide encoded by cDNA contained in Clone ID NO:Z.

[0882] Further preferred is an isolated polypeptide comprising an amino acid sequence at least 95% identical to a sequence of at least about 100 contiguous amino acids in the amino acid sequence of SEQ ID NO:Y; a polypeptide encoded by SEQ ID NO:X or the complementary strand thereto; the polypeptide encoded by the nucleotide sequence as defined in columns 8 and 9 of Table 2; and/or a polypeptide encoded by cDNA contained in Clone ID NO:Z.

[0883] Further preferred is an isolated polypeptide comprising an amino acid sequence at least 95% identical to the complete amino acid sequence of SEQ ID NO:Y; a polypeptide encoded by SEQ ID NO:X or the complementary strand thereto; the polypeptide encoded by the nucleotide sequence as defined in columns 8 and 9 of Table 2; and/or a polypeptide encoded by cDNA contained in Clone ID NO:Z.

[0884] Further preferred is an isolated polypeptide comprising an amino acid sequence at least 90% identical to a sequence of at least about 10 contiguous amino acids in the complete amino acid sequence of a polypeptide encoded by contained in Clone ID NO:Z

[0885] Also preferred is a polypeptide wherein said sequence of contiguous amino acids is included in the amino acid sequence of a portion of said polypeptide encoded by cDNA contained in Clone ID NO:Z; a polypeptide encoded by SEQ ID NO:X or the complementary strand thereto; the polypeptide encoded by the nucleotide sequence as defined in columns 8 and 9 of Table 2; and/or the polypeptide sequence of SEQ ID NO:Y.

[0886] Also preferred is an isolated polypeptide comprising an amino acid sequence at least 95% identical to a sequence of at least about 30 contiguous amino acids in the amino acid sequence of a polypeptide encoded by the cDNA contained in Clone ID NO:Z.

[0887] Also preferred is an isolated polypeptide comprising an amino acid =sequence at least 95% identical to a sequence of at least about 100 contiguous amino acids in the amino acid sequence of a polypeptide encoded by cDNA contained in Clone ID NO:Z.

[0888] Also preferred is an isolated polypeptide comprising an amino acid sequence at least 95% identical to the amino acid sequence of a polypeptide encoded by the cDNA contained in Clone ID NO:Z.

[0889] Further preferred is an isolated antibody which binds specifically to a polypeptide comprising an amino acid sequence that is at least 90% identical to a sequence of at least 10 contiguous amino acids in a sequence selected from the group consisting of: a polypeptide sequence of SEQ ID NO:Y; a polypeptide encoded by SEQ ID NO:X or the complementary strand thereto; the polypeptide encoded by the nucleotide sequence as defined in columns 8 and 9 of Table 2; and a polypeptide encoded by the cDNA contained in Clone ID NO:Z.

[0890] Further preferred is a method for detecting in a biological sample a polypeptide comprising an amino acid sequence which is at least 90% identical to a sequence of at least 10 contiguous amino acids in a sequence selected from the group consisting of: a polypeptide sequence of SEQ ID NO:Y; a polypeptide encoded by SEQ ID NO:X or the complementary strand thereto; the polypeptide encoded by the nucleotide sequence as defined in columns 8 and 9 of Table 2; and a polypeptide encoded by the cDNA contained in Clone ID NO:Z; which method comprises a step of comparing an amino acid sequence of at least one polypeptide molecule in said sample with a sequence selected from said group and determining whether the sequence of said polypeptide molecule in said sample is at least 90% identical to said sequence of at least 10 contiguous amino acids.

[0891] Also preferred is the above method wherein said step of comparing an amino acid sequence of at least one polypeptide molecule in said sample with a sequence selected from said group comprises determining the extent of specific binding of polypeptides in said sample to an antibody which binds specifically to a polypeptide comprising an amino acid sequence that is at least 90% identical to a sequence of at least 10 contiguous amino acids in a sequence selected from the group consisting of: a polypeptide sequence of SEQ ID NO:Y; a polypeptide encoded by SEQ ID NO:X or the complementary strand thereto; the polypeptide encoded by the nucleotide sequence as defined in columns 8 and 9 of Table 2; and a polypeptide encoded by the cDNA contained in Clone ID NO:Z.

[0892] Also preferred is the above method wherein said step of comparing sequences is performed by comparing the amino acid sequence determined from a polypeptide molecule in said sample with said sequence selected from said group.

[0893] Also preferred is a method for identifying the species, tissue or cell type of a biological sample which method comprises a step of detecting polypeptide molecules in said sample, if any, comprising an amino acid sequence that is at least 90% identical to a sequence of at least 10 contiguous amino acids in a sequence selected from the group consisting of: polypeptide sequence of SEQ ID NO:Y; a polypeptide encoded by SEQ ID NO:X or the complementary strand thereto; the polypeptide encoded by the nucleotide sequence as defined in columns 8 and 9 of Table 2; and a polypeptide encoded by the cDNA contained in Clone ID NO:Z.

[0894] Also preferred is the above method for identifying the species, tissue or cell type of a biological sample, which method comprises a step of detecting polypeptide molecules comprising an amino acid sequence in a panel of at least two amino acid sequences, wherein at least one sequence in said panel is at least 90% identical to a sequence of at least 10 contiguous amino acids in a sequence selected from the above group.

[0895] Also preferred is a method for diagnosing in a subject a pathological condition associated with abnormal structure or expression of a nucleic acid sequence identified in Table 1A or Table 2 encoding a polypeptide, which method comprises a step of detecting in a biological sample obtained from said subject polypeptide molecules comprising an amino acid sequence in a panel of at least two amino acid sequences, wherein at least one sequence in said panel is at least 90% identical to a sequence of at least 10 contiguous amino acids in a sequence selected from the group consisting of: polypeptide sequence of SEQ ID NO:Y; a polypeptide encoded by SEQ ID NO:X or the complementary strand thereto; the polypeptide encoded by the nucleotide sequence as defined in columns 8 and 9 of Table 2; and a polypeptide encoded by the cDNA contained in Clone ID NO:Z.

[0896] In any of these methods, the step of detecting said polypeptide molecules includes using an antibody.

[0897] Also preferred is an isolated nucleic acid molecule comprising a nucleotide sequence which is at least 95% identical to a nucleotide sequence encoding a polypeptide wherein said polypeptide comprises an amino acid sequence that is at least 90% identical to a sequence of at least 10 contiguous amino acids in a sequence selected from the group consisting of: polypeptide sequence of SEQ ID NO:Y; a polypeptide encoded by SEQ ID NO:X or the complementary strand thereto; the polypeptide encoded by the nucleotide sequence as defined in columns 8 and 9 of Table 2; and a polypeptide encoded by the cDNA contained in Clone ID NO:Z.

[0898] Also preferred is an isolated nucleic acid molecule, wherein said nucleotide sequence encoding a polypeptide has been optimized for expression of said polypeptide in a prokaryotic host.

[0899] Also preferred is a polypeptide molecule, wherein said polypeptide comprises an amino acid sequence selected from the group consisting of: polypeptide sequence of SEQ ID NO:Y; a polypeptide encoded by SEQ ID NO:X or the complementary strand thereto; the polypeptide encoded by the nucleotide sequence as defined in columns 8 and 9 of Table 2; and a polypeptide encoded by the cDNA contained in Clone ID NO:Z.

[0900] Further preferred is a method of making a recombinant vector comprising inserting any of the above isolated nucleic acid molecule into a vector. Also preferred is the recombinant vector produced by this method. Also preferred is a method of making a recombinant host cell comprising introducing the vector into a host cell, as well as the recombinant host cell produced by this method.

[0901] Also preferred is a method of making an isolated polypeptide comprising culturing this recombinant host cell under conditions such that said polypeptide is expressed and recovering said polypeptide. Also preferred is this method of making an isolated polypeptide, wherein said recombinant host cell is a eukaryotic cell and said polypeptide is a human protein comprising an amino acid sequence selected from the group consisting of: polypeptide sequence of SEQ ID NO:Y; a polypeptide encoded by SEQ ID NO:X or the complementary strand thereto; the polypeptide encoded by the nucleotide sequence as defined in columns 8 and 9 of Table 2; and a polypeptide encoded by the cDNA contained in Clone ID NO:Z. The isolated polypeptide produced by this method is also preferred.

[0902] Also preferred is a method of treatment of an individual in need of an increased level of a protein activity, which method comprises administering to such an individual a Therapeutic comprising an amount of an isolated polypeptide, polynucleotide, immunogenic fragment or analogue thereof, binding agent, antibody, or antigen binding fragment of the claimed invention effective to increase the level of said protein activity in said individual.

[0903] Also preferred is a method of treatment of an individual in need of a decreased level of a protein activity, which method comprised administering to such an individual a Therapeutic comprising an amount of an isolated polypeptide, polynucleotide, immunogenic fragment or analogue thereof, binding agent, antibody, or antigen binding fragment of the claimed invention effective to decrease the level of said protein activity in said individual.

[0904] Also preferred is a method of treatment of an individual in need of a specific delivery of toxic compositions to diseased cells (e.g., tumors, leukemias or lymphomas), which method comprises administering to such an individual a Therapeutic comprising an amount of an isolated polypeptide of the invention, including, but not limited to a binding agent, or antibody of the claimed invention that are associated with toxin or cytotoxic prodrugs.

[0905] Having generally described the invention, the same will be more readily understood by reference to the following examples, which are provided by way of illustration and are not intended as limiting.

TABLE 6

| ATCC Deposits | Deposit Date | ATCC Designation Number |
|---|---|---|
| LP01, LP02, LP03, | May-20-97 | 209059, 209060, 209061, 209062, |
| LP04, LP05, LP06, | | 209063, 209064, 209065, 209066, |
| LP07, LP08, LP09, | | 209067, 209068, 209069 |
| LP10, LP11, | | |
| LP12 | Jan-12-98 | 209579 |
| LP13 | Jan-12-98 | 209578 |
| LP14 | Jul-16-98 | 203067 |
| LP15 | Jul-16-98 | 203068 |
| LP16 | Feb-1-99 | 203609 |
| LP17 | Feb-1-99 | 203610 |
| LP20 | Nov-17-98 | 203485 |
| LP21 | Jun-18-99 | PTA-252 |
| LP22 | Jun-18-99 | PTA-253 |
| LP23 | Dec-22-99 | PTA-1081 |

### EXAMPLES

### Example 1

### Isolation of a Selected cDNA Clone from the Deposited Sample

[0906] Each Clone ID NO:Z is contained in a plasmid. Table 7 identifies the vectors used to construct the cDNA library from which each clone was isolated. In many cases, the vector used to construct the library is a phage vector from which a plasmid has been excised. The following correlates the related plasmid for each phage vector used in constructing the cDNA library. For example, where a particular clone is identified in Table 7 as being isolated in the vector “Lambda Zap,” the corresponding deposited clone is in “pBluescript.”

| Vector Used to Construct Library | Corresponding Deposited Plasmid |
|---|---|
| Lambda Zap | pBluescript (pBS) |
| Uni-Zap XR | pBluescript (pBS) |
| Zap Express | pBK |
| lafmid BA | plafmid BA |
| pSport1 | pSport1 |
| pCMVSport 2.0 | pCMVSport 2.0 |
| pCMVSport 3.0 | pCMVSport 3.0 |
| pCR ® 2.1 | pCR ® 2.1 |

[0907] Vectors Lambda Zap (U.S. Pat. Nos. 5,128,256 and 5,286,636), Uni-Zap XR (U.S. Pat. Nos. 5,128, 256 and 5,286,636), Zap Express (U.S. Pat. Nos. 5,128,256 and 5,286,636), pBluescript (pBS) (Short, J. M. et al., Nucleic Acids Res. 16:7583-7600 (1988); Alting-Mees, M. A. and Short, J. M., Nucleic Acids Res. 17:9494 (1989)) and pBK (Alting-Mees, M. A. et al., Strategies 5:58-61 (1992)) are commercially available from Stratagene Cloning Systems, Inc., 11011 N. Torrey Pines Road, La Jolla, Calif., 92037. pBS contains an ampicillin resistance gene and pBK contains a neomycin resistance gene. Both can be transformed into E. coli strain XL-1 Blue, also available from Stratagene. pBS comes in 4 forms SK+, SK−, KS+ and KS. The S and K refers to the orientation of the polylinker to the T7 and T3 primer sequences which flank the polylinker region (“S” is for SacI and “K” is for KpnI which are the first sites on each respective end of the linker). “+” or “−” refer to the orientation of the fl origin of replication (“ori”), such that in one orientation, single stranded rescue initiated from the fl ori generates sense strand DNA and in the other, antisense.

[0908] Vectors pSportl, pCMVSport 2.0 and pCMVSport 3.0, were obtained from Life Technologies, Inc., P. O. Box 6009, Gaithersburg, Md. 20897. All Sport vectors contain an ampicillin resistance gene and may be transformed into E. coli strain DHIOB, also available from Life Technologies. (See, for instance, Gruber, C. E., et al., Focus 15:59 (1993).) Vector lafmid BA (Bento Soares, Columbia University, N.Y.) contains an ampicillin resistance gene and can be transformed into E. coli strain XL-1 Blue. Vector pCR®2.1, which is available from Invitrogen, 1600 Faraday Avenue, Carlsbad, Calif. 92008, contains an ampicillin resistance gene and may be transformed into E. coli strain DHIOB, available from Life Technologies. (See, for instance, Clark, J. M., Nuc. Acids Res. 16:9677-9686 (1988) and Mead, D. et al., Bio/Technology 9: (1991).) Preferably, a polynucleotide of the present invention does not comprise the .vector sequences identified for the particular clone in Table 7, as well as the corresponding plasmid vector sequences designated above.

[0909] The deposited material in the sample assigned the ATCC Deposit Number cited by reference to Tables 1, 2, 6 and 7 for any given cDNA clone also may contain one or more additional plasmids, each comprising a cDNA clone different from that given clone. Thus, deposits sharing the same ATCC Deposit Number contain at least a plasmid for each Clone ID NO:Z.

TABLE 7

| Libraries owned by Catalog | Catalog Description | Vector | ATCC Deposit |
|---|---|---|---|
| HUKA HUKB HUKC HUKD | Human Uterine Cancer | Lambda ZAP II | LP01 |
| HUKE HUKF HUKG | | | |
| HCNA HCNB | Human Colon | Lambda Zap II | LP01 |
| HFFA | Human Fetal Brain, random | Lambda Zap II | LP01 |
| | primed | | |
| HTWA | Resting T-Cell | Lambda ZAP II | LP01 |
| HBQA | Early Stage Human Brain, | Lambda ZAP II | LP01 |
| | ramdon primed | | |
| HLMB HLMF HLMG HLMH | breast lymph node CDNA library | Lambda ZAP II | LP01 |
| HLMI HLMJ HLMM HLMN | | | |
| HCQA HCQB | human colon cancer | Lamda ZAP II | LP01 |
| HMEA HMEC HMED HMEE | Human Microvascular | Lambda ZAP II | LP01 |
| HMEF HMEG HMEI HMEJ | Endothelial Cells, fract. A | | |
| HMEK HMEL | | | |
| HUSA HUSC | Human Umbilical Vein | Lambda ZAP II | LP01 |
| | Endothelial Cells, fract. A | | |
| HLQA HLQB | Hepatocellular Tumor | Lambda ZAP II | LP01 |
| HHGA HHGB HHGC HHGD | Hemangiopericytoma | Lambda ZAP II | LP01 |
| HSDM | Human Striatum Depression, re- | Lambda ZAP II | LP01 |
| | rescue | | |
| HUSH | H Umbilical Vein Endothelial | Lambda ZAP II | LP01 |
| | Cells, frac A, re-excision | | |
| HSGS | Salivary gland, subtracted | Lambda ZAP II | LP01 |
| HFXA HFXB HFXC HFXD | Brain frontal cortex | Lambda ZAP II | LP01 |
| HFXE HFXF HFXG HFXH | | | |
| HPQA HPQB HPQC | PERM TF274 | Lambda ZAP II | LP01 |
| HFXJ HFXK | Brain Frontal Cortex, re-excision | Lambda ZAP II | LP01 |
| HCWA HCWB HCWC | CD34 positive cells (Cord Blood) | ZAP Express | LP02 |
| HCWD HCWE HCWF | | | |
| HCWG HCWH HCWI | | | |
| HCWJ HCWK | | | |
| HCUA HCUB HCUC | CD34 depleted Buffy Coat (Cord | ZAP Express | LP02 |
| | Blood) | | |
| HRSM | A-14 cell line | ZAP Express | LP02 |
| HRSA | A1-CELL LINE | ZAP Express | LP02 |
| HCUD HCUE HCUF HCUG | CD34 depleted Buffy Coat (Cord | ZAP Express | LP02 |
| HCUH HCUI | Blood), re-excision | | |
| HBXE HBXF HBXG | H. Whole Brain #2, re-excision | ZAP Express | LP02 |
| HRLM | L8 cell line | ZAP Express | LP02 |
| HBXA HBXB HBXC HBXD | Human Whole Brain #2 - Oligo | ZAP Express | LP02 |
| | dT > 1.5 Kb | | |
| HUDA HUDB HUDC | Testes | ZAP Express | LP02 |
| HHTM HHTN HHTO | H. hypothalamus, frac A; re- | ZAP Express | LP02 |
| | excision | | |
| HHTL | H. hypothalamus, frac A | ZAP Express | LP02 |
| HASA HASD | Human Adult Spleen | Uni-ZAP XR | LP03 |
| HFKC HFKD HFKE HFKF | Human Fetal Kidney | Uni-ZAP XR | LP03 |
| HFKG | | | |
| HE8A HE8B HE8C HE8D | Human 8 Week Whole Embryo | Uni-ZAP XR | LP03 |
| HE8E HE8F HE8M HE8N | | | |
| HGBA HGBD HGBE HGBF | Human Gall Bladder | Uni-ZAP XR | LP03 |
| HGBG HGBH HGBI | | | |
| HLHA HLHB HLHC HLHD | Human Fetal Lung III | Uni-ZAP XR | LP03 |
| HLHE HLHF HLHG HLHH | | | |
| HLHQ | | | |
| HPMA HPMB HPMC HPMD | Human Placenta | Uni-ZAP XR | LP03 |
| HPME HPMF HPMG HPMH | | | |
| HPRA HPRB HPRC HPRD | Human Prostate | Uni-ZAP XR | LP03 |
| HSIA HSIC HSID HSIE | Human Adult Small Intestine | Uni-ZAP XR | LP03 |
| HTEA HTEB HTEC HTED | Human Testes | Uni-ZAP XR | LP03 |
| HTEE HTEF HTEG HTEH | | | |
| HTEI HTEJ HTEK | | | |
| HTPA HTPB HTPC HTPD | Human Pancreas Tumor | Uni-ZAP XR | LP03 |
| HTPE | | | |
| HTTA HTTB HTTC HTTD | Human Testes Tumor | Uni-ZAP XR | LP03 |
| HTTE HTTF | | | |
| HAPA HAPB HAPC HAPM | Human Adult Pulmonary | Uni-ZAP XR | LP03 |
| HETA HETB HETC HETD | Human Endometrial Tumor | Uni-ZAP XR | LP03 |
| HETE HETF HETG HETH | | | |
| HETI | | | |
| HHFB HHFC HHFD HHFE | Human Fetal Heart | Uni-ZAP XR | LP03 |
| HHFF HHFG HHFH HHFI | | | |
| HHPB HHPC HHPD HHPE | Human Hippocampus | Uni-ZAP XR | LP03 |
| HHPF HHPG HHPH | | | |
| HCE1 HCE2 HCE3 HCE4 | Human Cerebellum | Uni-ZAP XR | LP03 |
| HCE5 HCEB HCEC HCED | | | |
| HCEE HCEF HCEG | | | |
| HUVB HUVC HUVD HUVE | Human Umbilical Vein, Endo. | Uni-ZAP XR | LP03 |
| | remake | | |
| HSTA HSTB HSTC HSTD | Human Skin Tumor | Uni-ZAP XR | LP03 |
| HTAA HTAB HTAC HTAD | Human Activated T-Cells | Uni-ZAP XR | LP03 |
| HTAE | | | |
| HFEA HFEB HFEC | Human Fetal Epithelium (Skin) | Uni-ZAP XR | LP03 |
| HJPA HJPB HJPC HJPD | HUMAN JURKAT | Uni-ZAP XR | LP03 |
| | MEMBRANE BOUND | | |
| | POLYSOMES | | |
| HESA | Human epithelioid sarcoma | Uni-Zap XR | LP03 |
| HLTA HLTB HLTC HLTD | Human T-Cell Lymphoma | Uni-ZAP XR | LP03 |
| HLTE HLTF | | | |
| HFTA HFTB HFTC HFTD | Human Fetal Dura Mater | Uni-ZAP XR | LP03 |
| HRDA HRDB HRDC HRDD | Human Rhabdomyosarcoma | Uni-ZAP XR | LP03 |
| HRDE HRDF | | | |
| HCAA HCAB HCAC | Cem cells cyclohexamide treated | Uni-ZAP XR | LP03 |
| HRGA HRGB HRGC HRGD | Raji Cells, cyclohexamide treated | Uni-ZAP XR | LP03 |
| HSUA HSUB HSUC HSUM | Supt Cells, cyclohexamide treated | Uni-ZAP XR | LP03 |
| HT4A HT4C HT4D | Activated T-Cells, 12 hrs. | Uni-ZAP XR | LP03 |
| HE9A HE9B HE9C HE9D | Nine Week Old Early Stage | Uni-ZAP XR | LP03 |
| HE9E HE9F HE9G HE9H | Human | | |
| HE9M HE9N | | | |
| HATA HATB HATC HATD | Human Adrenal Gland Tumor | Uni-ZAP XR | LP03 |
| HATE | | | |
| HT5A | Activated T-Cells, 24 hrs. | Uni-ZAP XR | LP03 |
| HFGA HFGM | Human Fetal Brain | Uni-ZAP XR | LP03 |
| HNEA HNEB HNEC HNED | Human Neutrophil | Uni-ZAP XR | LP03 |
| HNEE | | | |
| HBGB HBGD | Human Primary Breast Cancer | Uni-ZAP XR | LP03 |
| HBNA HBNB | Human Normal Breast | Uni-ZAP XR | LP03 |
| HCAS | Cem Cells, cyclohexamide | Uni-ZAP XR | LP03 |
| | treated, subtra | | |
| HHPS | Human Hippocampus, subtracted | pBS | LP03 |
| HKCS HKCU | Human Colon Cancer, subtracted | pBS | LP03 |
| HRGS | Raji cells, cyclohexamide treated, | pBS | LP03 |
| | subtracted | | |
| HSUT | Supt cells, cyclohexamide | pBS | LP03 |
| | treated, differentially expressed | | |
| HT4S | Activated T-Cells, 12 hrs, | Uni-ZAP XR | LP03 |
| | subtracted | | |
| HCDA HCDB HCDC | Human Chondrosarcoma | Uni-ZAP XR | LP03 |
| HCDD HCDE | | | |
| HOAA HOAB HOAC | Human Osteosarcoma | Uni-ZAP XR | LP03 |
| HTLA HTLB HTLC HTLD | Human adult testis, large inserts | Uni-ZAP XR | LP03 |
| HTLE HTLF | | | |
| HLMA HLMC HLMD | Breast Lymph node cDNA library | Uni-ZAP XR | LP03 |
| H6EA H6EB H6EC | HL-60, PMA 4H | Uni-ZAP XR | LP03 |
| HTXA HTXB HTXC HTXD | Activated T-Cell | Uni-ZAP XR | LP03 |
| HTXE HTXF HTXG HTXH | (12 hs)/Thiouridine labelledEco | | |
| HNFA HNFB HNFC HNFD | Human Neutrophil, Activated | Uni-ZAP XR | LP03 |
| HNFE HNFF HNFG HNFH | | | |
| HNFJ | | | |
| HTOB HTOC | HUMAN TONSILS, FRACTION | Uni-ZAP XR | LP03 |
| | 2 | | |
| HMGB | Human OB MG63 control | Uni-ZAP XR | LP03 |
| | fraction I | | |
| HOPB | Human OB HOS control fraction | Uni-ZAP XR | LP03 |
| | I | | |
| HORB | Human OB HOS treated (10 nM | Uni-ZAP XR | LP03 |
| | E2) fraction I | | |
| HSVA HSVB HSVC | Human Chronic Synovitis | Uni-ZAP XR | LP03 |
| HROA | HUMAN STOMACH | Uni-ZAP XR | LP03 |
| HBJA HBJB HBJC HBJD | HUMAN B CELL LYMPHOMA | Uni-ZAP XR | LP03 |
| HBJE HBJF HBJG HBJH | | | |
| HBJI HBJJ HBJK | | | |
| HCRA HCRB HCRC | human corpus colosum | Uni-ZAP XR | LP03 |
| HODA HODB HODC HODD | human ovarian cancer | Uni-ZAP XR | LP03 |
| HDSA | Dermatofibrosarcoma | Uni-ZAP XR | LP03 |
| | Protuberance | | |
| HMWA HMWB HMWC | Bone Marrow Cell Line (RS4;11) | Uni-ZAP XR | LP03 |
| HMWD HMWE HMWF | | | |
| HMWG HMWH HMWI | | | |
| HMWJ | | | |
| HSOA | stomach cancer (human) | Uni-ZAP XR | LP03 |
| HERA | SKIN | Uni-ZAP XR | LP03 |
| HMDA | Brain-medulloblastoma | Uni-ZAP XR | LP03 |
| HGLA HGLB HGLD | Glioblastoma | Uni-ZAP XR | LP03 |
| HEAA | H. Atrophic Endometrium | Uni-ZAP XR | LP03 |
| HBCA HBCB | H. Lymph node breast Cancer | Uni-ZAP XR | LP03 |
| HPWT | Human Prostate BPH, re-excision | Uni-ZAP XR | LP03 |
| HFVG HFVH HFVI | Fetal Liver, subtraction II | pBS | LP03 |
| HNFI | Human Neutrophils, Activated, | pBS | LP03 |
| | re-excision | | |
| HBMB HBMC HBMD | Human Bone Marrow, re- | pBS | LP03 |
| | excision | | |
| HKML HKMM HKMN | H. Kidney Medulla, re-excision | pBS | LP03 |
| HKIX HKIY | H. Kidney Cortex, subtracted | pBS | LP03 |
| HADT | H. Amygdala Depression, | pBS | LP03 |
| | subtracted | | |
| H6AS | HI-60, untreated, subtracted | Uni-ZAP XR | LP03 |
| H6ES | HL-60, PMA 4H, subtracted | Uni-ZAP XR | LP03 |
| H6BS | HL-60, RA 4h, Subtracted | Uni-ZAP XR | LP03 |
| H6CS | HL-60, PMA 1d, subtracted | Uni-ZAP XR | LP03 |
| HTXJ HTXK | Activated T- | Uni-ZAP XR | LP03 |
| | cell (12 h)/Thiouridine-re-excision | | |
| HMSA HMSB HMSC HMSD | Monocyte activated | Uni-ZAP XR | LP03 |
| HMSE HMSF HMSG HMSH | | | |
| HMSI HMSJ HMSK | | | |
| HAGA HAGB HAGC HAGD | Human Amygdala | Uni-ZAP XR | LP03 |
| HAGE HAGF | | | |
| HSRA HSRB HSRE | STROMAL - | Uni-ZAP XR | LP03 |
| | OSTEOCLASTOMA | | |
| HSRD HSRF HSRG HSRH | Human Osteoclastoma Stromal | Uni-ZAP XR | LP03 |
| | Cells - unamplified | | |
| HSQA HSQB HSQC HSQD | Stromal cell TF274 | Uni-ZAP XR | LP03 |
| HSQE HSQF HSQG | | | |
| HSKA HSKB HSKC HSKD | Smooth muscle, serum treated | Uni-ZAP XR | LP03 |
| HSKE HSKF HSKZ | | | |
| HSLA HSLB HSLC HSLD | Smooth muscle, control | Uni-ZAP XR | LP03 |
| HSLE HSLF HSLG | | | |
| HSDA HSDD HSDE HSDF | Spinal cord | Uni-ZAP XR | LP03 |
| HSDG HSDH | | | |
| HPWS | Prostate-BPH subtracted II | pBS | LP03 |
| HSKW HSKX HSKY | Smooth Muscle- HASTE | pBS | LP03 |
| | normalized | | |
| HFPB HFPC HFPD | H. Frontal cortex, epileptic; re- | Uni-ZAP XR | LP03 |
| | excision | | |
| HSDI HSDJ HSDK | Spinal Cord, re-excision | Uni-ZAP XR | LP03 |
| HSKN HSKO | Smooth Muscle Serum Treated, | pBS | LP03 |
| | Norm | | |
| HSKG HSKH HSKI | Smooth muscle, serum | pBS | LP03 |
| | induced, re-exc | | |
| HFCA HFCB HFCC HFCD | Human Fetal Brain | Uni-ZAP XR | LP04 |
| HFCE HFCF | | | |
| HPTA HPTB HPTD | Human Pituitary | Uni-ZAP XR | LP04 |
| HTHB HTHC HTHD | Human Thymus | Uni-ZAP XR | LP04 |
| HE6B HE6C HE6D HE6E | Human Whole Six Week Old | Uni-ZAP XR | LP04 |
| HE6F HE6G HE6S | Embryo | | |
| HSSA HSSB HSSC HSSD | Human Synovial Sarcoma | Uni-ZAP XR | LP04 |
| HSSE HSSF HSSG HSSH | | | |
| HSSI HSSJ HSSK | | | |
| HE7T | 7 Week Old Early Stage Human, | Uni-ZAP XR | LP04 |
| | subtracted | | |
| HEPA HEPB HEPC | Human Epididymus | Uni-ZAP XR | LP04 |
| HSNA HSNB HSNC HSNM | Human Synovium | Uni-ZAP XR | LP04 |
| HSNN | | | |
| HPFB HPFC HPFD HPFE | Human Prostate Cancer, Stage C | Uni-ZAP XR | LP04 |
| | fraction | | |
| HE2A HE2D HE2E HE2H | 12 Week Old Early Stage Human | Uni-ZAP XR | LP04 |
| HE2I HE2M HE2N HE2O | | | |
| HE2B HE2C HE2F HE2G | 12 Week Old Early Stage Human, | Uni-ZAP XR | LP04 |
| HE2P HE2Q | II | | |
| HPTS HPTT HPTU | Human Pituitary, subtracted | Uni-ZAP XR | LP04 |
| HAUA HAUB HAUC | Amniotic Cells - TNF induced | Uni-ZAP XR | LP04 |
| HAQA HAQB HAQC HAQD | Amniotic Cells - Primary Culture | Uni-ZAP XR | LP04 |
| HWTA HWTB HWTC | wilm's tumor | Uni-ZAP XR | LP04 |
| HBSD | Bone Cancer, re-excision | Uni-ZAP XR | LP04 |
| HSGB | Salivary gland, re-excision | Uni-ZAP XR | LP04 |
| HSJA HSJB HSJC | Smooth muscle-ILb induced | Uni-ZAP XR | LP04 |
| HSXA HSXB HSXC HSXD | Human Substantia Nigra | Uni-ZAP XR | LP04 |
| HSHA HSHB HSHC | Smooth muscle, IL1b induced | Uni-ZAP XR | LP04 |
| HOUA HOUB HOUC HOUD | Adipocytes | Uni-ZAP XR | LP04 |
| HOUE | | | |
| HPWA HPWB HPWC HPWD | Prostate BPH | Uni-ZAP XR | LP04 |
| HPWE | | | |
| HELA HELB HELC HELD | Endothelial cells-control | Uni-ZAP XR | LP04 |
| HELE HELF HELG HELH | | | |
| HEMA HEMB HEMC HEMD | Endothelial-induced | Uni-ZAP XR | LP04 |
| HEME HEMF HEMG HEMH | | | |
| HBIA HBIB HBIC | Human Brain, Striatum | Uni-ZAP XR | LP04 |
| HHSA HHSB HHSC HHSD | Human | Uni-ZAP XR | LP04 |
| HHSE | Hypothalmus, Schizophrenia | | |
| HNGA HNGB HNGC HNGD | neutrophils control | Uni-ZAP XR | LP04 |
| HNGE HNGF HNGG HNGH | | | |
| HNGI HNGJ | | | |
| HNHA HNHB HNHC HNHD | Neutrophils IL-1 and LPS | Uni-ZAP XR | LP04 |
| HNHE HNHF HNHG HNHH | induced | | |
| HNHI HNHJ | | | |
| HSDB HSDC | STRIATUM DEPRESSION | Uni-ZAP XR | LP04 |
| HHPT | Hypothalamus | Uni-ZAP XR | LP04 |
| HSAT HSAU HSAV HSAW | Anergic T-cell | Uni-ZAP XR | LP04 |
| HSAX HSAY HSAZ | | | |
| HBMS HBMT HBMU HBMV | Bone marrow | Uni-ZAP XR | LP04 |
| HBMW HBMX | | | |
| HOEA HOEB HOEC HOED | Osteoblasts | Uni-ZAP XR | LP04 |
| HOEE HOEF HOEJ | | | |
| HAIA HAIB HAIC HAID | Epithelial-TNFa and INF induced | Uni-ZAP XR | LP04 |
| HAIE HAIF | | | |
| HTGA HTGB HTGC HTGD | Apoptotic T-cell | Uni-ZAP XR | LP04 |
| HMCA HMCB HMCC HMCD | Macrophage-oxLDL | Uni-ZAP XR | LP04 |
| HMCE | | | |
| HMAA HMAB HMAC | Macrophage (GM-CSF treated) | Uni-ZAP XR | LP04 |
| HMAD HMAE HMAF | | | |
| HMAG | | | |
| HPHA | Normal Prostate | Uni-ZAP XR | LP04 |
| HPIA HPIB HPIC | LNCAP prostate cell line | Uni-ZAP XR | LP04 |
| HPJA HPJB HPJC | PC3 Prostate cell line | Uni-ZAP XR | LP04 |
| HOSE HOSF HOSG | Human Osteoclastoma, re- | Uni-ZAP XR | LP04 |
| | excision | | |
| HTGE HTGF | Apoptotic T-cell, re-excision | Uni-ZAP XR | LP04 |
| HMAJ HMAK | H Macrophage (GM-CSF | Uni-ZAP XR | LP04 |
| | treated), re-excision | | |
| HACB HACC HACD | Human Adipose Tissue, re- | Uni-ZAP XR | LP04 |
| | excision | | |
| HFPA | H. Frontal Cortex, Epileptic | Uni-ZAP XR | LP04 |
| HFAA HFAB HFAC HFAD | Alzheimer's, spongy change | Uni-ZAP XR | LP04 |
| HFAE | | | |
| HFAM | Frontal Lobe, Dementia | Uni-ZAP XR | LP04 |
| HMIA HMIB HMIC | Human Manic Depression Tissue | Uni-ZAP XR | LP04 |
| HTSA HTSE HTSF HTSG | Human Thymus | pBS | LP05 |
| HTSH | | | |
| HPBA HPBB HPBC HPBD | Human Pineal Gland | pBS | LP05 |
| HPBE | | | |
| HSAA HSAB HSAC | HSA 172 Cells | pBS | LP05 |
| HSBA HSBB HSBC HSBM | HSC172 cells | pBS | LP05 |
| HJAA HJAB HJAC HJAD | Jurkat T-cell G1 phase | pBS | LP05 |
| HJBA HJBB HJBC HJBD | Jurkat T-Cell, S phase | pBS | LP05 |
| HAFA HAFB | Aorta endothelial cells + TNF-a | pBS | LP05 |
| HAWA HAWB HAWC | Human White Adipose | pBS | LP05 |
| HTNA HTNB | Human Thyroid | pBS | LP05 |
| HONA | Normal Ovary, Premenopausal | pBS | LP05 |
| HARA HARB | Human Adult Retina | pBS | LP05 |
| HLJA HLJB | Human Lung | pCMVSport 1 | LP06 |
| HOFM HOFN HOFO | H. Ovarian Tumor, II, OV5232 | pCMVSport 2.0 | LP07 |
| HOGA HOGB HOGC | OV 10-3-95 | pCMVSport 2.0 | LP07 |
| HCGL | CD34+ cells, II | pCMVSport 2.0 | LP07 |
| HDLA | Hodgkin's Lymphoma I | pCMVSport 2.0 | LP07 |
| HDTA HDTB HDTC HDTD | Hodgkin's Lymphoma II | pCMVSport 2.0 | LP07 |
| HDTE | | | |
| HKAA HKAB HKAC HKAD | Keratinocyte | pCMVSport2.0 | LP07 |
| HKAE HKAF HKAG HKAH | | | |
| HCIM | CAPFINDER, Crohn's Disease, | pCMVSport 2.0 | LP07 |
| | lib 2 | | |
| HKAL | Keratinocyte, lib 2 | pCMVSport2.0 | LP07 |
| HKAT | Keratinocyte, lib 3 | pCMVSport2.0 | LP07 |
| HNDA | Nasal polyps | pCMVSport2.0 | LP07 |
| HDRA | H. Primary Dendritic Cells, lib 3 | pCMVSport2.0 | LP07 |
| HOHA HOHB HOHC | Human Osteoblasts II | pCMVSport2.0 | LP07 |
| HLDA HLDB HLDC | Liver, Hepatoma | pCMVSport2.0 | LP08 |
| HLDN HLDO HLDP | Human Liver, normal | pCMVSport3.0 | LP08 |
| HMTA | pBMC stimulated w/poly I/C | pCMVSport3.0 | LP08 |
| HNTA | NTERA2, control | pCMVSport3.0 | LP08 |
| HDPA HDPB HDPC HDPD | Primary Dendritic Cells, lib 1 | pCMVSport3.0 | LP08 |
| HDPF HDPG HDPH HDPI | | | |
| HDPJ HDPK | | | |
| HDPM HDPN HDPO HDPP | Primary Dendritic cells,frac 2 | pCMVSport3.0 | LP08 |
| HMUA HMUB HMUC | Myoloid Progenitor Cell Line | pCMVSport3.0 | LP08 |
| HHEA HHEB HHEC HHED | T Cell helper I | pCMVSport3.0 | LP08 |
| HHEM HHEN HHEO HHEP | T cell helper II | pCMVSport3.0 | LP08 |
| HEQA HEQB HEQC | Human endometrial stromal cells | pCMVSport3.0 | LP08 |
| HJMA HJMB | Human endometrial stromal cells- | pCMVSport3.0 | LP08 |
| | treated with progesterone | | |
| HSWA HSWB HSWC | Human endometrial stromal cells- | pCMVSport3.0 | LP08 |
| | treated with estradiol | | |
| HSYA HSYB HSYC | Human Thymus Stromal Cells | pCMVSport3.0 | LP08 |
| HLWA HLWB HLWC | Human Placenta | pCMVSport3.0 | LP08 |
| HRAA HRAB HRAC | Rejected Kidney, lib 4 | pCMVSport3.0 | LP08 |
| HMTM | PCR, pBMC I/C treated | PCRII | LP09 |
| HMJA | H. Meniingima, M6 | pSport 1 | LP10 |
| HMKA HMKB HMKC | H. Meningima, M1 | pSport 1 | LP10 |
| HMKD HMKE | | | |
| HUSG HUSI | Human umbilical vein endothelial | pSport 1 | LP10 |
| | cells, IL-4 induced | | |
| HUSX HUSY | Human Umbilical Vein | pSport 1 | LP10 |
| | Endothelial Cells, uninduced | | |
| HOFA | Ovarian Tumor I, OV5232 | pSport 1 | LP10 |
| HCFA HCFB HCFC HCFD | T-Cell PHA 16 hrs | pSport 1 | LP10 |
| HCFL HCFM HCFN HCFO | T-Cell PHA 24 hrs | pSport 1 | LP10 |
| HADA HADC HADD HADE | Human Adipose | pSport 1 | LP10 |
| HADF HADG | | | |
| HOVA HOVB HOVC | Human Ovary | pSport 1 | LP10 |
| HTWB HTWC HTWD HTWE | Resting T-Cell Library, II | pSport 1 | LP10 |
| HTWF | | | |
| HMMA | Spleen metastic melanoma | pSport 1 | LP10 |
| HLYA HLYB HLYC HLYD | Spleen, Chronic lymphocytic | pSport 1 | LP10 |
| HLYE | leukemia | | |
| HCGA | CD34+ cell, I | pSport 1 | LP10 |
| HEOM HEON | Human Eosinophils | pSport 1 | LP10 |
| HTDA | Human Tonsil, Lib 3 | pSport 1 | LP10 |
| HSPA | Salivary Gland, Lib 2 | pSport 1 | LP10 |
| HCHA HCHB HCHC | Breast Cancer cell line, MDA 36 | pSport 1 | LP10 |
| HCHM HCHN | Breast Cancer Cell line, | pSport 1 | LP10 |
| | angiogenic | | |
| HCIA | Crohn's Disease | pSport 1 | LP10 |
| HDAA HDAB HDAC | HEL cell line | pSport 1 | LP10 |
| HABA | Human Astrocyte | pSport 1 | LP10 |
| HUFA HUFB HUFC | Ulcerative Colitis | pSport 1 | LP10 |
| HNTM | NTERA2 + retinoic acid, 14 days | pSport 1 | LP10 |
| HDQA | Primary Dendritic | pSport 1 | LP10 |
| | cells, CapFinder2, frac 1 | | |
| HDQM | Primary Dendritic Cells, | pSport 1 | LP10 |
| | CapFinder, frac 2 | | |
| HLDX | Human Liver, normal, CapFinder | pSport 1 | LP10 |
| HULA HULB HULC | Human Dermal Endothelial | pSport1 | LP10 |
| | Cells, untreated | | |
| HUMA | Human Dermal Endothelial | pSport1 | LP10 |
| | cells, treated | | |
| HCJA | Human Stromal Endometrial | pSport1 | LP10 |
| | fibroblasts, untreated | | |
| HCJM | Human Stromal endometrial | pSport1 | LP10 |
| | fibroblasts, treated w/estradiol | | |
| HEDA | Human Stromal endometrial | pSport1 | LP10 |
| | fibroblasts, treated with | | |
| | progesterone | | |
| HFNA | Human ovary tumor cell | pSport1 | LP10 |
| | OV350721 | | |
| HKGA HKGB HKGC HKGD | Merkel Cells | pSport1 | LP10 |
| HISA HISB HISC | Pancreas Islet Cell Tumor | pSport1 | LP10 |
| HLSA | Skin, burned | pSport1 | LP10 |
| HBZA | Prostate,BPH, Lib 2 | pSport 1 | LP10 |
| HBZS | Prostate BPH, Lib 2, subtracted | pSport 1 | LP10 |
| HFIA HFIB HFIC | Synovial Fibroblasts (control) | pSport 1 | LP10 |
| HFIH HFII HFIJ | Synovial hypoxia | pSport 1 | LP10 |
| HFIT HFIU HFIV | Synovial IL-1/TNF stimulated | pSport 1 | LP10 |
| HGCA | Messangial cell, frac 1 | pSport1 | LP10 |
| HMVA HMVB HMVC | Bone Marrow Stromal Cell, | pSport1 | LP10 |
| | untreated | | |
| HFIX HFIY HFIZ | Synovial Fibroblasts (III/TNF), | pSport1 | LP10 |
| | subt | | |
| HFOX HFOY HFOZ | Synovial hypoxia-RSF subtracted | pSport1 | LP10 |
| HMQA HMQB HMQC | Human Activated Monocytes | Uni-ZAP XR | LP11 |
| HMQD | | | |
| HLIA HLIB HLIC | Human Liver | pCMVSport 1 | LP012 |
| HHBA HHBB HHBC HHBD | Human Heart | pCMVSport 1 | LP012 |
| HHBE | | | |
| HBBA HBBB | Human Brain | pCMVSport 1 | LP012 |
| HLJA HLJB HLJC HLJD | Human Lung | pCMVSport 1 | LP012 |
| HLJE | | | |
| HOGA HOGB HOGC | Ovarian Tumor | pCMVSport 2.0 | LP012 |
| HTJM | Human Tonsils, Lib 2 | pCMVSport 2.0 | LP012 |
| HAMF HAMG | KMH2 | pCMVSport 3.0 | LP012 |
| HAJA HAJB HAJC | L428 | pCMVSport 3.0 | LP012 |
| HWBA HWBB HWBC | Dendritic cells, pooled | pCMVSport 3.0 | LP012 |
| HWBD HWBE | | | |
| HWAA HWAB HWAC | Human Bone Marrow, treated | pCMVSport 3.0 | LP012 |
| HWAD HWAE | | | |
| HYAA HYAB HYAC | B Cell lymphoma | pCMVSport 3.0 | LP012 |
| HWHG HWHH HWHI | Healing groin wound, 6.5 hours | pCMVSport 3 0 | LP012 |
| | post incision | | |
| HWHP HWHQ HWHR | Healing groin wound; 7.5 hours | pCMVSport 3.0 | LP012 |
| | post incision | | |
| HARM | Healing groin wound - zero hr | pCMVSport 3.0 | LP012 |
| | post-incision (control) | | |
| HBIM | Olfactory epithelium, nasalcavity | pCMVSport 3.0 | LP012 |
| HWDA | Healing Abdomen wound; 70 & 90 | pCMVSport 3.0 | LP012 |
| | min post incision | | |
| HWEA | Healing Abdomen Wound; 15 | pCMVSport 3.0 | LP012 |
| | days post incision | | |
| HWJA | Healing Abdomen Wound; 21 & 29 | pCMVSport 3.0 | LP012 |
| | days | | |
| HNAL | Human Tongue, frac 2 | pSport1 | LP012 |
| HMJA | H. Meniingima, M6 | pSport1 | LP012 |
| HMKA HMKB HMKC | H. Meningima, M1 | pSport1 | LP012 |
| HMKD HMKE | | | |
| HOFA | Ovarian Tumor I, OV5232 | pSport1 | LP012 |
| HCFA HCFB HCFC HCFD | T-Cell PHA 16 hrs | pSport1 | LP012 |
| HCFL HCFM HCFN HCFO | T-Cell PHA 24 hrs | pSport1 | LP012 |
| HMMA HMMB HMMC | Spleen metastic melanoma | pSport1 | LP012 |
| HTDA | Human Tonsil, Lib 3 | pSport1 | LP012 |
| HDBA | Human Fetal Thymus | pSport1 | LP012 |
| HDUA | Pericardium | pSport1 | LP012 |
| HBZA | Prostate,BPH, Lib 2 | pSport1 | LP012 |
| HWCA | Larynx tumor | pSport1 | LP012 |
| HWKA | Normal lung | pSport1 | LP012 |
| HSMB | Bone marrow stroma, treated | pSport1 | LP012 |
| HBHM | Normal trachea | pSport1 | LP012 |
| HLFC | Human Larynx | pSport1 | LP012 |
| HLRB | Siebben Polyposis | pSport1 | LP012 |
| HNIA | Mammary Gland | pSport1 | LP012 |
| HNJB | Palate carcinoma | pSport1 | LP012 |
| HNKA | Palate normal | pSport1 | LP012 |
| HMZA | Pharynx carcinoma | pSport1 | LP012 |
| HABG | Cheek Carcinoma | pSport1 | LP012 |
| HMZM | Pharynx Carcinoma | pSport1 | LP012 |
| HDRM | Larynx Carcinoma | pSport1 | LP012 |
| HVAA | Pancreas normal PCA4 No | pSport1 | LP012 |
| HICA | Tongue carcinoma | pSport1 | LP012 |
| HUKA HUKB HUKC HUKD | Human Uterine Cancer | Lambda ZAP II | LP013 |
| HUKE | | | |
| HFFA | Human Fetal Brain, random | Lambda ZAP II | LP013 |
| | primed | | |
| HTUA | Activated T-cell labeled with 4- | Lambda ZAP II | LP013 |
| | thioluri | | |
| HBQA | Early Stage Human Brain, | Lambda ZAP II | LP013 |
| | random primed | | |
| HMEB | Human microvascular | Lambda ZAP II | LP013 |
| | Endothelial cells, fract. B | | |
| HUSH | Human Umbilical Vein | Lambda ZAP II | LP013 |
| | Endothelial cells, fract. A, re- | | |
| | excision | | |
| HLQC HLQD | Hepatocellular tumor, re-excision | Lambda ZAP II | LP013 |
| HTWJ HTWK HTWL | Resting T-cell, re-excision | Lambda ZAP II | LP013 |
| HF6S | Human Whole 6 week Old | pBluescript | LP013 |
| | Embryo (II), subt | | |
| HHPS | Human Hippocampus, subtracted | pBluescript | LP013 |
| HLIS | LNCAP, differential expression | pBluescript | LP013 |
| HLHS HLHT | Early Stage Human Lung, | pBluescript | LP013 |
| | Subtracted | | |
| HSUS | Supt cells, cyclohexamide | pBluescript | LP013 |
| | treated, subtracted | | |
| HSUT | Supt cells, cyclohexamide | pBluescript | LP013 |
| | treated, differentially expressed | | |
| HSDS | H. Striatum Depression, | pBluescript | LP013 |
| | subtracted | | |
| HPTZ | Human Pituitary, Subtracted VII | pBluescript | LP013 |
| HSDX | H. Striatum Depression, subt II | pBluescript | LP013 |
| HSDZ | H. Striatum Depression, subt | pBluescript | LP013 |
| HPBA HPBB HPBC HPBD | Human Pineal Gland | pBluescript SK- | LP013 |
| HPBE | | | |
| HRTA | Colorectal Tumor | pBluescript SK- | LP013 |
| HSBA HSBB HSBC HSBM | HSC172 cells | pBluescript SK- | LP013 |
| HJAA HJAB HJAC HJAD | Jurkat T-cell G1 phase | pBluescript SK- | LP013 |
| HJBA HJBB HJBC HJBD | Jurkat T-cell, S1 phase | pBluescript SK- | LP013 |
| HTNA HTNB | Human Thyroid | pBluescript SK- | LP013 |
| HAHA HAHB | Human Adult Heart | Uni-ZAP XR | LP013 |
| HE6A | Whole 6 week Old Embryo | Uni-ZAP XR | LP013 |
| HFCA HFCB HFCC HFCD | Human Fetal Brain | Uni-ZAP XR | LP013 |
| HFCE | | | |
| HFKC HFKD HFKE HFKF | Human Fetal Kidney | Uni-ZAP XR | LP013 |
| HFKG | | | |
| HGBA HGBD HGBE HGBF | Human Gall Bladder | Uni-ZAP XR | LP013 |
| HGBG | | | |
| HPRA HPRB HPRC HPRD | Human Prostate | Uni-ZAP XR | LP013 |
| HTEA HTEB HTEC HTED | Human Testes | Uni-ZAP XR | LP013 |
| HTEE | | | |
| HTTA HTTB HTTC HTTD | Human Testes Tumor | Uni-ZAP XR | LP013 |
| HTTE | | | |
| HYBA HYBB | Human Fetal Bone | Uni-ZAP XR | LP013 |
| HFLA | Human Fetal Liver | Uni-ZAP XR | LP013 |
| HHFB HHFC HHFD HHFE | Human Fetal Heart | Uni-ZAP XR | LP013 |
| HHFF | | | |
| HUVB HUVC HUVD HUVE | Human Umbilical Vein, End. | Uni-ZAP XR | LP013 |
| | remake | | |
| HTHB HTHC HTHD | Human Thymus | Uni-ZAP XR | LP013 |
| HSTA HSTB HSTC HSTD | Human Skin Tumor | Uni-ZAP XR | LP013 |
| HTAA HTAB HTAC HTAD | Human Activated T-cells | Uni-ZAP XR | LP013 |
| HTAE | | | |
| HFEA HFEB HFEC | Human Fetal Epithelium (skin) | Uni-ZAP XR | LP013 |
| HJPA HJPB HJPC HJPD | Human Jurkat Membrane Bound | Uni-ZAP XR | LP013 |
| | Polysomes | | |
| HESA | Human Epithelioid Sarcoma | Uni-ZAP XR | LP013 |
| HALS | Human Adult Liver, Subtracted | Uni-ZAP XR | LP013 |
| HFTA HFTB HFTC HFTD | Human Fetal Dura Mater | Uni-ZAP XR | LP013 |
| HCAA HCAB HCAC | Cem cells, cyclohexamide treated | Uni-ZAP XR | LP013 |
| HRGA HRGB HRGC HRGD | Raji Cells, cyclohexamide treated | Uni-ZAP XR | LP013 |
| HE9A HE9B HE9C HE9D | Nine Week Old Early Stage | Uni-ZAP XR | LP013 |
| HE9E | Human | | |
| HSFA | Human Fibrosarcoma | Uni-ZAP XR | LP013 |
| HATA HATB HATC HATD | Human Adrenal Gland Tumor | Uni-ZAP XR | LP013 |
| HATE | | | |
| HTRA | Human Trachea Tumor | Uni-ZAP XR | LP013 |
| HE2A HE2D HE2E HE2H | 12 Week Old Early Stage Human | Uni-ZAP XR | LP013 |
| HE2I | | | |
| HE2B HE2C HE2F HE2G | 12 Week Old Early Stage Human, | Uni-ZAP XR | LP013 |
| HE2P | II | | |
| HNEA HNEB HNEC HNED | Human Neutrophil | Uni-ZAP XR | LP013 |
| HNEE | | | |
| HBGA | Human Primary Breast Cancer | Uni-ZAP XR | LP013 |
| HPTS HPTT HPTU | Human Pituitary, subtracted | Uni-ZAP XR | LP013 |
| HMQA HMQB HMQC | Human Activated Monocytes | Uni-ZAP XR | LP013 |
| HMQD | | | |
| HOAA HOAB HOAC | Human Osteosarcoma | Uni-ZAP XR | LP013 |
| HTOA HTOD HTOE HTOF | human tonsils | Uni-ZAP XR | LP013 |
| HTOG | | | |
| HMGB | Human OB MG63 control | Uni-ZAP XR | LP013 |
| | fraction I | | |
| HOPB | Human OB HOS control | Uni-ZAP XR | LP013 |
| | fraction I | | |
| HOQB | Human OB HOS treated (1 nM | Uni-ZAP XR | LP013 |
| | E2) fraction I | | |
| HAUA HAUB HAUC | Amniotic Cells - TNF induced | Uni-ZAP XR | LP013 |
| HAQA HAQB HAQC HAQD | Amniotic Cells - Primary Culture | Uni-ZAP XR | LP013 |
| HROA HROC | HUMAN STOMACH | Uni-ZAP XR | LP013 |
| HBJA HBJB HBJC HBJD | HUMAN B CELL LYMPHOMA | Uni-ZAP XR | LP013 |
| HBJE | | | |
| HODA HODB HODC HODD | human ovarian cancer | Uni-ZAP XR | LP013 |
| HCPA | Corpus Callosum | Uni-ZAP XR | LP013 |
| HSOA | stomach cancer (human) | Uni-ZAP XR | LP013 |
| HERA | SKIN | Uni-ZAP XR | LP013 |
| HMDA | Brain-medulloblastoma | Uni-ZAP XR | LP013 |
| HGLA HGLB HGLD | Glioblastoma | Uni-ZAP XR | LP013 |
| HWTA HWTB HWTC | wilm's tumor | Uni-ZAP XR | LP013 |
| HEAA | H. Atrophic Endometrium | Uni-ZAP XR | LP013 |
| HAPN HAPO HAPP HAPQ | Human Adult Pulmonary; re- | Uni-ZAP XR | LP013 |
| HAPR | excision | | |
| HLTG HLTH | Human T-cell lymphoma; re- | Uni-ZAP XR | LP013 |
| | excision | | |
| HAHC HAHD HAHE | Human Adult Heart; re-excision | Uni-ZAP XR | LP013 |
| HAGA HAGB HAGC HAGD | Human Amygdala | Uni-ZAP XR | LP013 |
| HAGE | | | |
| HSJA HSJB HSJC | Smooth muscle-ILb induced | Uni-ZAP XR | LP013 |
| HSHA HSHB HSHC | Smooth muscle, IL1b induced | Uni-ZAP XR | LP013 |
| HPWA HPWB HPWC HPWD | Prostate BPH | Uni-ZAP XR | LP013 |
| HPWE | | | |
| HPIA HPIB HPIC | LNCAP prostate cell line | Uni-ZAP XR | LP013 |
| HPJA HPJB HPJC | PC3 Prostate cell line | Uni-ZAP XR | LP013 |
| HBTA | Bone Marrow Stroma, TNF&LPS | Uni-ZAP XR | LP013 |
| | ind | | |
| HMCF HMCG HMCH HMCI | Macrophage-oxLDL; re-excision | Uni-ZAP XR | LP013 |
| HMCJ | | | |
| HAGG HAGH HAGI | Human Amygdala; re-excision | Uni-ZAP XR | LP013 |
| HACA | H. Adipose Tissue | Uni-ZAP XR | LP013 |
| HKFB | K562 + PMA (36 hrs), re-excision | ZAP Express | LP013 |
| HCWT HCWU HCWV | CD34 positive cells (cord | ZAP Express | LP013 |
| | blood), re-ex | | |
| HBWA | Whole brain | ZAP Express | LP013 |
| HBXA HBXB HBXC HBXD | Human Whole Brain #2 - Oligo | ZAP Express | LP013 |
| | dT > 1.5 Kb | | |
| HAVM | Temporal cortex-Alzheizmer | pT-Adv | LP014 |
| HAVT | Hippocampus, Alzheimer | pT-Adv | LP014 |
| | Subtracted | | |
| HHAS | CHME Cell Line | Uni-ZAP XR | LP014 |
| HAJR | Larynx normal | pSport 1 | LP014 |
| HWLE HWLF HWLG HWLH | Colon Normal | pSport 1 | LP014 |
| HCRM HCRN HCRO | Colon Carcinoma | pSport 1 | LP014 |
| HWLI HWLJ HWLK | Colon Normal | pSport 1 | LP014 |
| HWLQ HWLR HWLS HWLT | Colon Tumor | pSport 1 | LP014 |
| HBFM | Gastrocnemius Muscle | pSport 1 | LP014 |
| HBOD HBOE | Quadriceps Muscle | pSport 1 | LP014 |
| HBKD HBKE | Soleus Muscle | pSport 1 | LP014 |
| HCCM | Pancreatic Langerhans | pSport 1 | LP014 |
| HWGA | Larynx carcinoma | pSport 1 | LP014 |
| HWGM HWGN | Larynx carcinoma | pSport 1 | LP014 |
| HWLA HWLB HWLC | Normal colon | pSport 1 | LP014 |
| HWLM HWLN | Colon Tumor | pSport 1 | LP014 |
| HVAM HVAN HVAO | Pancreas Tumor | pSport 1 | LP014 |
| HWGQ | Larynx carcinoma | pSport 1 | LP014 |
| HAQM HAQN | Salivary Gland | pSport 1 | LP014 |
| HASM | Stomach; normal | pSport 1 | LP014 |
| HBCM | Uterus; normal | pSport 1 | LP014 |
| HCDM | Testis; normal | pSport 1 | LP014 |
| HDJM | Brain; normal | pSport 1 | LP014 |
| HEFM | Adrenal Gland, normal | pSport 1 | LP014 |
| HBAA | Rectum normal | pSport 1 | LP014 |
| HFDM | Rectum tumour | pSport 1 | LP014 |
| HGAM | Colon, normal | pSport 1 | LP014 |
| HHMM | Colon, tumour | pSport 1 | LP014 |
| HCLB HCLC | Human Lung Cancer | Lambda Zap II | LP015 |
| HRLA | L1 Cell line | ZAP Express | LP015 |
| HHAM | Hypothalamus, Alzheimer's | pCMVSport 3.0 | LP015 |
| HKBA | Ku 812F Basophils Line | pSport 1 | LP015 |
| HS2S | Saos2, Dexamethosome Treated | pSport 1 | LP016 |
| HA5A | Lung Carcinoma A549 TNFalpha | pSport 1 | LP016 |
| | activated | | |
| HTFM | TF-1 Cell Line GM-CSF Treated | pSport 1 | LP016 |
| HYAS | Thyroid Tumour | pSport 1 | LP016 |
| HUTS | Larynx Normal | pSport 1 | LP016 |
| HXOA | Larynx Tumor | pSport 1 | LP016 |
| HEAH | Ea.hy.926 cell line | pSport 1 | LP016 |
| HINA | Adenocarcinoma Human | pSport 1 | LP016 |
| HRMA | Lung Mesothelium | pSport 1 | LP016 |
| HLCL | Human Pre-Differentiated | Uni-Zap XR | LP017 |
| | Adipocytes | | |
| HS2A | Saos2 Cells | pSport 1 | LP020 |
| HS2I | Saos2 Cells; Vitamin D3 Treated | pSport 1 | LP020 |
| HUCM | CHME Cell Line, untreated | pSport 1 | LP020 |
| HEPN | Aryepiglottis Normal | pSport 1 | LP020 |
| HPSN | Sinus Piniformis Tumour | pSport 1 | LP020 |
| HNSA | Stomach Normal | pSport 1 | LP020 |
| HNSM | Stomach Tumour | pSport 1 | LP020 |
| HNLA | Liver Normal Met5No | pSport 1 | LP020 |
| HUTA | Liver Tumour Met 5 Tu | pSport 1 | LP020 |
| HOCN | Colon Normal | pSport 1 | LP020 |
| HOCT | Colon Tumor | pSport 1 | LP020 |
| HTNT | Tongue Tumour | pSport 1 | LP020 |
| HLXN | Larynx Normal | pSport 1 | LP020 |
| HLXT | Larynx Tumour | pSport 1 | LP020 |
| HTYN | Thymus | pSport 1 | LP020 |
| HPLN | Placenta | pSport 1 | LP020 |
| HTNG | Tongue Normal | pSport 1 | LP020 |
| HZAA | Thyroid Normal (SDCA2 No) | pSport 1 | LP020 |
| HWES | Thyroid Thyroiditis | pSport 1 | LP020 |
| HFHD | Ficolled Human Stromal Cells, | pTriplEx2 | LP021 |
| | 5Fu treated | | |
| HFHM,HFHN | Ficolled Human Stromal Cells, | pTriplEx2 | LP021 |
| | Untreated | | |
| HPCI | Hep G2 Cells, Lambda library | lambda Zap-CMV | LP021 |
| | | XR | |
| HBCA,HBCB,HBCC | H. Lymph node breast Cancer | Uni-ZAP XR | LP021 |
| HCOK | Chondrocytes | pSPORT1 | LP022 |
| HDCA, HDCB, HDCC | Dendritic Cells From CD34 Cells | pSPORT1 | LP022 |
| HDMA, HDMB | CD40 activated monocyte | pSPORT1 | LP022 |
| | dendritic cells | | |
| HDDM, HDDN, HDDO | LPS activated derived dendritic | pSPORT1 | LP022 |
| | cells | | |
| HPCR | Hep G2 Cells, PCR library | lambda Zap-CMV | LP022 |
| | | XR | |
| HAAA, HAAB, HAAC | Lung, Cancer (4005313A3): | pSPORT1 | LP022 |
| | Invasive Poorly Differentiated | | |
| | Lung Adenocarcinoma | | |
| HIPA, HIPB, HIPC | Lung, Cancer (4005163 B7): | pSPORT1 | LP022 |
| | Invasive Poorly Diff. | | |
| | Adenocarcinoma, Metastatic | | |
| HOOH, HOOI | Ovary, Cancer: (4004562 B6) | pSPORT1 | LP022 |
| | Papillary Serous Cystic | | |
| | Neoplasm, Low Malignant Pot | | |
| HIDA | Lung, Normal: (4005313 B1) | pSPORT1 | LP022 |
| HUJA,HUJB,HUJC,HUJD,HU | B-Cells | pCMVSport 3.0 | LP022 |
| JE | | | |
| HNOA,HNOB,HNOC,HNOD | Ovary, Normal: (9805C040R) | pSPORT1 | LP022 |
| HNLM | Lung, Normal: (4005313 B1) | pSPORT1 | LP022 |
| HSCL | Stromal Cells | pSPORT1 | LP022 |
| HAAX | Lung, Cancer: (4005313 A3) | pSPORT1 | LP022 |
| | Invasive Poorly-differentiated | | |
| | Metastatic lung adenocarcinoma | | |
| HUUA,HUUB,HUUC,HUUD | B-cells (unstimulated) | pTriplEx2 | LP022 |
| HWWA,HWWB,HWWC,HW | B-cells (stimulated) | pSPORT1 | LP022 |
| WD,HWWE,HWWF,HWWG | | | |
| HCCC | Colon, Cancer: (9808C064R) | pCMVSport 3.0 | LP023 |
| HPDO HPDP HPDQ HPDR | Ovary, Cancer (9809C332): | pSport 1 | LP023 |
| HPD | Poorly differentiated | | |
| | adenocarcinoma | | |
| HPCO HPCP HPCQ HPCT | Ovary, Cancer (15395A1F): | pSport 1 | LP023 |
| | Grade II Papillary Carcinoma | | |
| HOCM HOCO HOCP HOCQ | Ovary, Cancer: (15799A1F) | pSport 1 | LP023 |
| | Poorly differentiated carcinoma | | |
| HCBM HCBN HCBO | Breast, Cancer: (4004943 A5) | pSport 1 | LP023 |
| HNBT HNBU HNBV | Breast, Normal: (4005522B2) | pSport 1 | LP023 |
| HBCP HBCQ | Breast, Cancer: (4005522 A2) | pSport 1 | LP023 |
| HBCJ | Breast, Cancer: (9806C012R) | pSport 1 | LP023 |
| HSAM HSAN | Stromal cells 3.88 | pSport 1 | LP023 |
| HVCA HVCB HVCC HVCD | Ovary, Cancer: (4004332 A2) | pSport 1 | LP023 |
| HSCK HSEN HSEO | Stromal cells (HBM3.18) | pSport 1 | LP023 |
| HSCP HSCQ | stromal cell clone 2.5 | pSport 1 | LP023 |
| HUXA | Breast Cancer: (4005385 A2) | pSport 1 | LP023 |
| HCOM HCON HCOO HCOP | Ovary, Cancer (4004650 A3): | pSport 1 | LP023 |
| HCOQ | Well-Differentiated | | |
| | Micropapillary Serous Carcinoma | | |
| HBNM | Breast, Cancer: (9802C020E) | pSport 1 | LP023 |
| HVVA HVVB HVVC HVVD | Human Bone Marrow, treated | pSport 1 | LP023 |
| HVVE | | | |

[0910] Two nonlimiting examples are provided below for isolating a particular clone from the deposited sample of plasmid cDNAs cited for that clone in Table 7. First, a plasmid is directly isolated by screening the clones using a polynucleotide probe corresponding to the nucleotide sequence of SEQ ID NO:X.

[0911] Particularly, a specific polynucleotide with 30-40 nucleotides is synthesized using an Applied Biosystems DNA synthesizer according to the sequence reported. The oligonucleotide is labeled, for instance, with ³²P-γ-ATP using T4 polynucleotide kinase and purified according to routine methods. (E.g., Maniatis et al., Molecular Cloning: A Laboratory Manual, Cold Spring Harbor Press, Cold Spring, N.Y. (1982).) The plasmid mixture is transformed into a suitable host, as indicated above (such as XL-1 Blue (Stratagene)) using techniques known to those of skill in the art, such as those provided by the vector supplier or in related publications or patents cited above. The transformants are plated on 1.5% agar plates (containing the appropriate selection agent, e.g., ampicillin) to a density of about 150 transformants (colonies) per plate. These plates are screened using Nylon membranes according to routine methods for bacterial colony screening (e.g., Sambrook et al., Molecular Cloning: A Laboratory Manual, 2nd Edit., (1989), Cold Spring Harbor Laboratory Press, pages 1.93 to 1.104), or other techniques known to those of skill in the art.

[0912] Alternatively, two primers of 17-20 nucleotides derived from both ends of the nucleotide sequence of SEQ ID NO:X are synthesized and used to amplify the desired cDNA using the deposited cDNA plasmid as a template. The polymerase chain reaction is carried out under routine conditions, for instance, in 25 μl of reaction mixture with 0.5 ug of the above cDNA template. A convenient reaction mixture is 1.5-5 mM MgCl₂, 0.01% (w/v) gelatin, 20 μM each of dATP, dCTP, dGTP, dTTP, 25 pmol of each primer and 0.25 Unit of Taq polymerase. Thirty five cycles of PCR (denaturation at 94° C. for 1 min; annealing at 55° C. for 1 min; elongation at 72° C. for 1 min) are performed with a Perkin-Elmer Cetus automated thermal cycler. The amplified product is analyzed by agarose gel electrophoresis and the DNA band with expected molecular weight is excised and purified. The PCR product is verified to be the selected sequence by subcloning and sequencing the DNA product.

[0913] Several methods are available for the identification of the 5′ or 3′ non-coding portions of a gene which may not be present in the deposited clone. These methods include but are not limited to, filter probing, clone enrichment using specific probes, and protocols similar or identical to 5′ and 3′ “RACE” protocols which are well known in the art. For instance, a method similar to 5′ RACE is available for generating the missing 5′ end of a desired full-length transcript. (Fromont-Racine et al., Nucleic Acids Res. 21(7):1683-1684 (1993).)

[0914] Briefly, a specific RNA oligonucleotide is ligated to the 5′ ends of a population of RNA presumably containing full-length gene RNA transcripts. A primer set containing a primer specific to the ligated RNA oligonucleotide and a primer specific to a known sequence of the gene of interest is used to PCR amplify the 5′ portion of the desired full-length gene. This amplified product may then be sequenced and used to generate the full length gene.

[0915] This above method starts with total RNA isolated from the desired source, although poly-A+ RNA can be used. The RNA preparation can then be treated with phosphatase if necessary to eliminate 5′ phosphate groups on degraded or damaged RNA which may interfere with the later RNA ligase step. The phosphatase should then be inactivated and the RNA treated with tobacco acid pyrophosphatase in order to remove the cap structure present at the 5′ ends of messenger RNAs. This reaction leaves a 5′ phosphate group at the 5′ end of the cap cleaved RNA which can then be ligated to an RNA oligonucleotide using T4 RNA ligase.

[0916] This modified RNA preparation is used as a template for first strand cDNA synthesis using a gene specific oligonucleotide. The first strand synthesis reaction is used as a template for PCR amplification of the desired 5′ end using a primer specific to the ligated RNA oligonucleotide and a primer specific to the known sequence of the gene of interest. The resultant product is then sequenced and analyzed to confirm that the 5′ end sequence belongs to the desired gene.

### Example 2

### Isolation of Genomic Clones Corresponding to a Polynucleotide

[0917] A human genomic P1 library (Genomic Systems, Inc.) is screened by PCR using primers selected for the sequence corresponding to SEQ ID NO:X according to the method described in Example 1. (See also, Sambrook et al., Molecular Cloning: A Laboratory Manual, 2nd Edn., (1989), Cold Spring Harbor Laboratory Press).

### Example 3

### Tissue Specific Expression Analysis

[0918] The Human Genome Sciences, Inc. (HGS) database is derived from sequencing tissue and/or disease specific cDNA libraries. Libraries generated from a particular tissue are selected and the specific tissue expression pattern of EST groups or assembled contigs within these libraries is determined by comparison of the expression patterns of those groups or contigs within the entire database. ESTs and assembled contigs which show tissue specific expression are selected.

[0919] The original clone from which the specific EST sequence was generated, or in the case of an assembled contig, the clone from which the 5′ most EST sequence was generated, is obtained from the catalogued library of clones and the insert amplified by PCR using methods known in the art. The PCR product is denatured and then transferred in 96 or 384 well format to a nylon membrane (Schleicher and Scheull) generating an array filter of tissue specific clones. Housekeeping genes, maize genes, and known tissue specific genes are included on the filters. These targets can be used in signal normalization and to validate assay sensitivity. Additional targets are included to monitor probe length and specificity of hybridization.

[0920] Radioactively labeled hybridization probes are generated by first strand cDNA synthesis per the manufacturer's instructions (Life Technologies) from mRNA/RNA samples prepared from the specific tissue being analyzed (e.g., coloresctal tissue, colorectal cancer, etc.). The hybridization probes are purified by gel exclusion chromatography, quantitated, and hybridized with the array filters in hybridization bottles at 65° C. overnight. The filters are washed under stringent conditions and signals are captured using a Fuji phosphorimager.

[0921] Data is extracted using AIS software and following background subtraction, signal normalization is performed. This includes a normalization of filter-wide expression levels between different experimental runs. Genes that are differentially expressed in the tissue of interest are identified.

### Example 4

### Chromosomal Mapping of the Polynucleotides

[0922] An oligonucleotide primer set is designed according to the sequence at the 5′ end of SEQ ID NO:X. This primer preferably spans about 100 nucleotides. This primer set is then used in a polymerase chain reaction under the following set of conditions: 30 seconds, 95° C.; 1 minute, 56° C.; 1 minute, 70° C. This cycle is repeated 32 times followed by one 5 minute cycle at 70° C. Human, mouse, and hamster DNA is used as template in addition to a somatic cell hybrid panel containing individual chromosomes or chromosome fragments (Bios, Inc). The reactions are analyzed on either 8% polyacrylamide gels or 3.5 % agarose gels. Chromosome mapping is determined by the presence of an approximately 100 bp PCR fragment in the particular somatic cell hybrid.

### Example 5

### Bacterial Expression of a Polypeptide

[0923] A polynucleotide encoding, a polypeptide of the present invention is amplified using PCR oligonucleotide primers corresponding to the 5′ and 3′ ends of the DNA sequence, as outlined in Example 1, to synthesize insertion fragments. The primers used to amplify the cDNA insert should preferably contain restriction sites, such as BamHI and XbaI, at the 5′ end of the primers in order to clone the amplified product into the expression vector. For example, BamHI and XbaI correspond to the restriction enzyme sites on the bacterial expression vector pQE-9. (Qiagen, Inc., Chatsworth, Calif.). This plasmid vector encodes antibiotic resistance (Ampr), a bacterial origin of replication (ori), an IPTG-regulatable promoter/operator (P/O), a ribosome binding site (RBS), a 6-histidine tag (6-His), and restriction enzyme cloning sites.

[0924] The pQE-9 vector is digested with BamHI and XbaI and the amplified fragment is ligated into the pQE-9 vector maintaining the reading frame initiated at the bacterial RBS. The ligation mixture is then used to transform the E. coli strain M15/rep4 (Qiagen, Inc.) which contains multiple copies of the plasmid pREP4, which expresses the laci repressor and also confers kanamycin resistance (Kanr). Transformants are identified by their ability to grow on LB plates and ampicillin/kanamycin resistant colonies are selected. Plasmid DNA is isolated and confirmed by restriction analysis.

[0925] Clones containing the desired constructs are grown overnight (ON) in liquid culture in LB media supplemented with both Amp (100 ug/ml) and Kan (25 ug/ml). The O/N culture is used to inoculate a large culture at a ratio of 1:100 to 1:250. The cells are grown to an optical density 600 (O.D.⁶⁰⁰) of between 0.4 and 0.6. IPTG (Isopropyl-B-D-thiogalacto pyranoside) is then added to a final concentration of 1 mM. IPTG induces by inactivating the lacI repressor, clearing the P/O leading to increased gene expression.

[0926] Cells are grown for an extra 3 to 4 hours. Cells are then harvested by centrifugation (20 mins at 6000× g). The cell pellet is solubilized in the chaotropic agent 6 Molar Guanidine HCl by stirring for 3-4 hours at 4° C. The cell debris is removed by centrifugation, and the supernatant containing the polypeptide is loaded onto a nickel-nitrilo-tri-acetic acid (“Ni-NTA”) affinity resin column (available from QIAGEN, Inc., supra). Proteins with a 6× His tag bind to the Ni-NTA resin with high affinity and can be purified in a simple one-step procedure (for details see: The QIAexpressionist (1995) QIAGEN, Inc., supra).

[0927] Briefly, the supernatant is loaded onto the column in 6 M guanidine-HCl, pH 8. The column is first washed with 10 volumes of 6 M guanidine-HCl, pH 8, then washed with 10 volumes of 6 M guanidine-HCl pH 6, and finally the polypeptide is eluted with 6 M guanidine-HCl, pH 5.

[0928] The purified protein is then renatured by dialyzing it against phosphate-buffered saline (PBS) or 50 mM Na-acetate, pH 6 buffer plus 200 mM NaCl. Alternatively, the protein can be successfully refolded while immobilized on the Ni-NTA column. The recommended conditions are as follows: renature using a linear 6M-1M urea gradient in 500 mM NaCl, 20% glycerol, 20 mM Tris/HCl pH 7.4, containing protease inhibitors. The renaturation should be performed over a period of 1.5 hours or more. After renaturation the proteins are eluted by the addition of 250 mM immidazole. Immidazole is removed by a final dialyzing step against PBS or 50 mM sodium acetate pH 6 buffer plus 200 mM NaCl. The purified protein is stored at 4° C. or frozen at −80° C.

[0929] In addition to the above expression vector, the present invention further includes an expression vector, called pHE4a (ATCC Accession Number 209645, deposited on Feb. 25, 1998) which contains phage operator and promoter elements operatively linked to a polynucleotide of the present invention. This vector contains: 1) a neomycinphosphotransferase gene as a selection marker, 2) an E. coli origin of replication, 3) a T5 phage promoter sequence, 4) two lac operator sequences, 5) a Shine-Delgarno sequence, and 6) the lactose operon repressor gene (lacIq). The origin of replication (oriC) is derived from pUC19 (LTI, Gaithersburg, Md.). The promoter and operator sequences are made synthetically.

[0930] DNA can be inserted into the pHE4a by restricting the vector with NdeI and XbaI, BamHI, XhoI, or Asp718, running the restricted product on a gel, and isolating the Larger fragment (the stuffer fragment should be about 310 base pairs). The DNA insert is generated according to the PCR protocol described in Example 1, using PCR primers having restriction sites for NdeI (5′ primer) and XbaI, BamHI, XhoI, or Asp718 (3′ primer). The PCR insert is gel purified and restricted with compatible enzymes. The insert and vector are ligated according to standard protocols.

[0931] The engineered vector could easily be substituted in the above protocol to express protein in a bacterial system.

### Example 6

### Purification of a Polypeptide from an Inclusion Body

[0932] The following alternative method can be used to purify a polypeptide expressed in E coli when it is present in the form of inclusion bodies. Unless otherwise specified, all of the following steps are conducted at 4-10° C.

[0933] Upon completion of the production phase of the E. Coli fermentation, the cell culture is cooled to 4-10° C. and the cells harvested by continuous centrifugation at 15,000 rpm (Heraeus Sepatech). On the basis of the expected yield of protein per unit weight of cell paste and the amount of purified protein required, an appropriate amount of cell paste, by weight, is suspended in a buffer solution containing 100 mM Tris, 50 mM EDTA, pH 7.4. The cells are dispersed to a homogeneous suspension using a high shear mixer.

[0934] The cells are then lysed by passing the solution through a microfluidizer (Microfuidics, Corp. or APV Gaulin, Inc.) twice at 4000-6000 psi. The homogenate is then mixed with NaCl solution to a final concentration of 0.5 M NaCl, followed by centrifugation at 7000× g for 15 min. The resultant pellet is washed again using 0.5M NaCl, 100 mM Tris, 50 mM EDTA, pH 7.4.

[0935] The resulting washed inclusion bodies are solubilized with 1.5 M guanidine hydrochloride (GuHCl) for 2-4 hours. After 7000× g centrifugation for 15 min., the pellet is discarded and the polypeptide containing supernatant is incubated at 4° C. overnight to allow further GuHCl extraction.

[0936] Following high speed centrifugation (30,000× g) to remove insoluble particles, the GuHCl solubilized protein is refolded by quickly mixing the GuHCl extract with 20 volumes of buffer containing 50 mM sodium, pH 4.5, 150 mM NaCl, 2 mM EDTA by vigorous stirring. The refolded diluted protein solution is kept at 4° C. without mixing for 12 hours prior to further purification steps.

[0937] To clarify the refolded polypeptide solution, a previously prepared tangential filtration unit equipped with 0.16 Am membrane filter with appropriate surface area (e.g., Filtron), equilibrated with 40 mM sodium acetate, pH 6.0 is employed. The filtered sample is loaded onto a cation exchange resin (e.g., Poros HS-50, Perseptive Biosystems). The column is washed with 40 mM sodium acetate, pH 6.0 and eluted with 250 mM, 500 mM, 1000 mM, and 1500 mM NaCl in the same buffer, in a stepwise manner. The absorbance at 280 nm of the effluent is continuously monitored. Fractions are collected and further analyzed by SDS-PAGE.

[0938] Fractions containing the polypeptide are then pooled and mixed with 4 volumes of water. The diluted sample is then loaded onto a previously prepared set of tandem columns of strong anion (Poros HQ-50, Perseptive Biosystems) and weak anion (Poros CM-20, Perseptive Biosystems) exchange resins. The columns are equilibrated with 40 mM sodium acetate, pH 6.0. Both columns are washed with 40 mM sodium acetate, pH 6.0, 200 mM NaCl. The CM-20 column is then eluted using a 10 column volume linear gradient ranging from 0.2 M NaCl, 50 mM sodium acetate, pH 6.0 to 1.0 M NaCl, 50 mM sodium acetate, pH 6.5. Fractions are collected under constant A₂₈₀ monitoring of the effluent. Fractions containing the polypeptide (determined, for instance, by 16% SDS-PAGE) are then pooled.

[0939] The resultant polypeptide should exhibit greater than 95% purity after the above refolding and purification steps. No major contaminant bands should be observed from Commassie blue stained 16% SDS-PAGE gel when 5 μg of purified protein is loaded. The purified protein can also be tested for endotoxin/LPS contamination, and typically the LPS content is less than 0.1 ng/ml according to LAL assays.

### Example 7

### Cloning and Expression of a Polypeptide in a Baculovirus Expression System

[0940] In this example, the plasmid shuttle vector pA2 is used to insert a polynucleotide into a baculovirus to express a polypeptide. This expression vector contains the strong polyhedrin promoter of the Autographa californica nuclear polyhedrosis virus (AcMNPV) followed by convenient restriction sites such as BamHl, Xba I and Asp718. The polyadenylation site of the simian virus 40 (“SV40”) is used for efficient polyadenylation. For easy selection of recombinant virus, the plasmid contains the beta-galactosidase gene from E. Coli under control of a weak Drosophila promoter in the same orientation, followed by the polyadenylation signal of the polyhedrin gene. The inserted genes are flanked on both sides by viral sequences for cell-mediated homologous recombination with wild-type viral DNA to generate a viable virus that express the cloned polynucleotide.

[0941] Many other baculovirus vectors can be used in place of the vector above, such as pAc373, pVL941, and pAcIMl, as one skilled in the art would readily appreciate, as long as the construct provides appropriately located signals for transcription, translation, secretion and the like, including a signal peptide and an in-frame AUG as required. Such vectors are described, for instance, in Luckow et al., Virology 170:31-39 (1989).

[0942] Specifically, the cDNA sequence contained in the deposited clone, including the AUG initiation codon, is amplified using the PCR protocol described in Example 1. If a naturally occurring signal sequence is used to produce the polypeptide of the present invention, the pA2 vector does not need a second signal peptide. Alternatively, the vector can be modified (pA2 GP) to include a baculovirus leader sequence, using the standard methods described in Summers et al., “A Manual of Methods for Baculovirus Vectors and Insect Cell Culture Procedures,” Texas Agricultural Experimental Station Bulletin No. 1555 (1987).

[0943] The amplified fragment is isolated from a 1% agarose gel using a commercially available kit (“Geneclean,” BIO 101 Inc., La Jolla, Calif.). The fragment then is digested with appropriate restriction enzymes and again purified on a 1% agarose gel.

[0944] The plasmid is digested with the corresponding restriction enzymes and optionally, can be dephosphorylated using calf intestinal phosphatase, using routine procedures known in the art. The DNA is then isolated from a 1% agarose gel using a commercially available kit (“Geneclean” BIO 101 Inc., La Jolla, Calif.).

[0945] The fragment and the dephosphorylated plasmid are ligated together with T4 DNA ligase. E. coli HB101 or other suitable E. coli hosts such as XL-1 Blue (Stratagene Cloning Systems, La Jolla, Calif.) cells are transformed with the ligation mixture and spread on culture plates. Bacteria containing the plasmid are identified by digesting DNA from individual colonies and analyzing the digestion product by gel electrophoresis. The sequence of the cloned fragment is confirmed by DNA sequencing.

[0946] Five μg of a plasmid containing the polynucleotide is co-transfected with 1.0 μg of a commercially available linearized baculovirus DNA (“BaculoGoldTm baculovirus DNA”, Pharmingen, San Diego, Calif.), using the lipofection method described by Felgner et al., Proc. Natl. Acad. Sci. USA 84:7413-7417 (1987). One μg of BaculoGold™ virus DNA and 5 μg of the plasmid are mixed in a sterile well of a microtiter plate containing 50 μl of serum-free Grace's medium (Life Technologies Inc., Gaithersburg, Md.). Afterwards, 10 μl Lipofectin plus 90 μl Grace's medium are added, mixed and incubated for 15 minutes at room temperature. Then the transfection mixture is added drop-wise to Sf9 insect cells (ATCC CRL 1711) seeded in a 35 mm tissue culture plate with 1 ml Grace's medium without serum. The plate is then incubated for 5 hours at 27° C. The transfection solution is then removed from the plate and 1 ml of Grace's insect medium supplemented with 10% fetal calf serum is added. Cultivation is then continued at 27° C. for four days.

[0947] After four days the supernatant is collected and a plaque assay is performed, as described by Summers and Smith, supra. An agarose gel with “Blue Gal” (Life Technologies Inc., Gaithersburg) is used to allow easy identification and isolation of gal-expressing clones, which produce blue-stained plaques. (A detailed description of a “plaque assay” of this type can also be found in the user's guide for insect cell culture and baculovirology distributed by Life Technologies Inc., Gaithersburg, page 9-10.) After appropriate incubation, blue stained plaques are picked with the tip of a micropipettor (e.g., Eppendorf). The agar containing the recombinant viruses is then resuspended in a microcentrifuge tube containing 200 μl of Grace's medium and the suspension containing the recombinant baculovirus is used to infect Sf9 cells seeded in 35 mm dishes. Four days later the supernatants of these culture dishes are harvested and then they are stored at 4° C.

[0948] To verify the expression of the polypeptide, Sf9 cells are grown in Grace's medium supplemented with 10% heat-inactivated FBS. The cells are infected with the recombinant baculovirus containing the polynucleotide at a multiplicity of infection (“MOI”) of about 2. If radiolabeled proteins are desired, 6 hours later the medium is removed and is replaced with SF900 II medium minus methionine and cysteine (available from Life Technologies Inc., Rockville, Md.). After 42 hours, 5 μCi of 3³⁵S-methionine and 5 μCi ³⁵S-cysteine (available from Amersham) are added. The cells are further incubated for 16 hours and then are harvested by centrifugation. The proteins in the supernatant as well as the intracellular proteins are analyzed by SDS-PAGE followed by autoradiography (if radiolabeled).

[0949] Microsequencing of the amino acid sequence of the amino terminus of purified protein may be used to determine the amino terminal sequence of the produced protein.

### Example 8

### Expression of a Polypeptide in Mammalian Cells

[0950] The polypeptide of the present invention can be expressed in a mammalian cell. A typical mammalian expression vector contains a promoter element, which mediates the initiation of transcription of mRNA, a protein coding sequence, and signals required for the termination of transcription and polyadenylation of the transcript. Additional elements include enhancers, Kozak sequences and intervening sequences flanked by donor and acceptor sites for RNA splicing. Highly efficient transcription is achieved with the early and late promoters from SV40, the long terminal repeats (LTRs) from Retroviruses, e.g., RSV, HTLVI, HIVI and the early promoter of the cytomegalovirus (CMV). However, cellular elements can also be used (e.g., the human actin promoter).

[0951] Suitable expression vectors for use in practicing the present invention include, for example, vectors such as pSVL and pMSG (Pharmacia, Uppsala, Sweden), pRSVcat (ATCC 37152), pSV2dhfr (ATCC 37146), pBC12MI (ATCC 67109), pCMVSport 2.0, and pCMVSport 3.0. Mammalian host cells that could be used include, human Hela, 293, H9 and Jurkat cells, mouse NIH3T3 and C127 cells, Cos 1, Cos 7 and CVI, quail QC1-3 cells, mouse L cells and Chinese hamster ovary (CHO) cells.

[0952] Alternatively, the polypeptide can be expressed in stable cell lines containing the polynucleotide integrated into a chromosome. The co-transfection with a selectable marker such as DHFR, gpt, neomycin, or hygromycin allows the identification and isolation of the transfected cells.

[0953] The transfected gene can also be amplified to express large amounts of the encoded protein. The DHFR (dihydrofolate reductase) marker is useful in developing cell lines that carry several hundred or even several thousand copies of the gene of interest. (See, e.g., Alt, F. W., et al., J. Biol. Chem. 253:1357-1370 (1978); Hamlin, J. L. and Ma, C., Biochem. et Biophys. Acta, 1097:107-143 (1990); Page, M. J. and Sydenham, M. A., Biotechnology 9:64-68 (1991).) Another useful selection marker is the enzyme glutamine synthase (GS) (Murphy et al., Biochem J. 227:277-279 (1991); Bebbington et al., Bio/Technology 10:169-175 (1992). Using these markers, the mammalian cells are grown in selective medium and the cells with the highest resistance are selected. These cell lines contain the amplified gene(s) integrated into a chromosome. Chinese hamster ovary (CHO) and NSO cells are often used for the production of proteins.

[0954] Derivatives of the plasmid pSV2-dhfr (ATCC Accession No. 37146), the expression vectors pC4 (ATCC Accession No. 209646) and pC6 (ATCC Accession No.209647) contain the strong promoter (LTR) of the Rous Sarcoma Virus (Cullen et al., Molecular and Cellular Biology, 438-447 (March, 1985)) plus a fragment of the CMV-enhancer (Boshart et al., Cell 41:521-530 (1985).) Multiple cloning sites, e.g., with the restriction enzyme cleavage sites BamHI, XbaI and Asp718, facilitate the cloning of the gene of interest. The vectors also contain the 3′ intron, the polyadenylation and termination signal of the rat preproinsulin gene, and the mouse DHFR gene under control of the SV40 early promoter.

[0955] Specifically, the plasmid pC6, for example, is digested with appropriate restriction enzymes and then dephosphorylated using calf intestinal phosphates by procedures known in the art. The vector is then isolated from a 1% agarose gel.

[0956] A polynucleotide of the present invention is amplified according to the protocol outlined in Example 1. If a naturally occurring signal sequence is used to produce the polypeptide of the present invention, the vector does not need a second signal peptide. Alternatively, if a naturally occurring signal sequence is not used, the vector can be modified to include a heterologous signal sequence. (See, e.g., International Publication No. WO 96/34891.)

[0957] The amplified fragment is isolated from a 1% agarose gel using a commercially available kit (“Geneclean,” BIO 101 Inc., La Jolla, Calif.). The fragment then is digested with appropriate restriction enzymes and again purified on a 1% agarose gel.

[0958] The amplified fragment is then digested with the same restriction enzyme and purified on a 1% agarose gel. The isolated fragment and the dephosphorylated vector are then ligated with T4 DNA ligase. E. coli HB101 or XL-1 Blue cells are then transformed and bacteria are identified that contain the fragment inserted into plasmid pC6 using, for instance, restriction enzyme analysis.

[0959] Chinese hamster ovary cells lacking an active DHFR gene is used for transfection. Five μg of the expression plasmid pC6 or pC4 is cotr-ansfected with 0.5 μg of the plasmid pSVneo using lipofectin (Felgner et al., supra). The plasmid pSV2-neo contains a dominant selectable marker, the neo gene from Tn5 encoding an enzyme that confers resistance to a group of antibiotics including G418. The cells are seeded in alpha minus MEM supplemented with 1 mglml G418. After 2 days, the cells are trypsinized and seeded in hybridoma cloning plates (Greiner, Germany) in alpha minus MEM supplemented with 10, 25, or 50 ng/ml of methotrexate plus 1 mg/ml G418. After about 10-14 days single clones are trypsinized and then seeded in 6-well petri dishes or 10 ml flasks using different concentrations of methotrexate (50 nM, 100 nM, 200 nM, 400 nM, 800 nM). Clones growing at the highest concentrations of methotrexate are then transferred to new 6-well plates containing even higher concentrations of methotrexate (1 μM, 2 μM, 5 μM, 10 mM, 20 mM). The same procedure is repeated until clones are obtained which grow at a concentration of 100 -200 μM. Expression of the desired gene product is analyzed, for instance, by SDS-PAGE and Western blot or by reversed phase HPLC analysis.

### Example 9

### Protein Fusions

[0960] The polypeptides of the present invention are preferably fused to other proteins. These fusion proteins can be used for a variety of applications. For example, fusion of the present polypeptides to His-tag, HA-tag, protein A, IgG domains, and maltose binding protein facilitates purification. (See Example 5; see also EP A 394,827; Traunecker, et al., Nature 331:84-86 (1988).) Similarly, fusion to IgG-1, IgG-3, and albumin increases the halflife time in vivo. Nuclear localization signals fused to the polypeptides of the present invention can target the protein to a specific subcellular localization, while covalent heterodimer or homodimers can increase or decrease the activity of a fusion protein. Fusion proteins can also create chimeric molecules having more than one function. Finally, fusion proteins can increase solubility and/or stability of the fused protein compared to the non-fused protein. All of the types of fusion proteins described above can be made by modifying the following protocol, which outlines the fusion of a polypeptide to an IgG molecule, or the protocol described in Example 5.

[0961] Briefly, the human Fc portion of the IgG molecule can be PCR amplified, using primers that span the 5′ and 3′ ends of the sequence described below. These primers also should have convenient restriction enzyme sites that will facilitate cloning into an expression vector, preferably a mammalian expression vector.

[0962] For example, if pC4 (ATCC Accession No. 209646) is used, the human Fc portion can be ligated into the BamHI cloning site. Note that the 3′ BamHI site should be destroyed. Next, the vector containing the human Fc portion is re-restricted with BamHI, linearizing the vector, and a polynucleotide of the present invention, isolated by the PCR protocol described in Example 1, is ligated into this BamHI site. Note that the polynucleotide is cloned without a stop codon, otherwise a fusion protein will not be produced.

[0963] If the naturally occurring signal sequence is used to produce the polypeptide of the present invention, pC4 does not need a second signal peptide. Alternatively, if the naturally occurring signal sequence is not used, the vector can be modified to include a heterologous signal sequence. (See, e.g., International Publication No. WO 96/34891.)

[0964] Human IgG Fc Region:

| | |
|---|---|
| GGGATCCGGAGCCCAAATCTTCTGACAAAACTCACACATGCCCACCGT | (SEQ ID NO: 1) |
| GCCCAGCACCTGAATTCGAGGGTGCACCGTCAGTCTTCCTCTTCCCCCC | |
| AAAACCCAAGGACACCCTCATGATCTCCCGGACTCCTGAGGTCACATG | |
| CGTGGTGGTGGACGTAAGCCACGAAGACCCTGAGGTCAAGTTCAACTG | |
| GTACGTGGACGGCGTGGAGGTGCATAATGCCAAGACAAAGCCGCGGG | |
| AGGAGCAGTACAACAGCACGTACCGTGTGGTCAGCGTCCTCACCGTCC | |
| TGCACCAGGACTGGCTGAATGGCAAGGAGTACAAGTGCAAGGTCTCCA | |
| ACAAAGCCCTCCCAACCCCCATCGAGAAAACCATCTCCAAAGCCAAAG | |
| GGCAGCCCCGAGAACCACAGGTGTACACCCTGCCCCCATCCCGGGATG | |
| AGCTGACCAAGAACCAGGTCAGCCTGACCTGCCTGGTCAAAGGCTTCT | |
| ATCCAAGCGACATCGCCGTGGAGTGGGAGAGCAATGGGCAGCCGGAG | |
| AACAACTACAAGACCACGCCTCCCGTGCTGGACTCCGACGGCTCCTTCT | |
| TCCTCTACAGCAAGCTCACCGTGGACAAGAGCAGGTGGCAGCAGGGGA | |
| ACGTCTTCTCATGCTCCGTGATGCATGAGGCTCTGCACAACCACTACAC | |
| GCAGAAGAGCCTCTCCCTGTCTCCGGGTAAATGAGTGCGACGGCCGCG | |
| ACTCTAGAGGAT | |

### Example 10

### Production of an Antibody from a Polypeptide Hybridoma Technology

[0965] The antibodies of the present invention can be prepared by a variety of methods. (See, Current Protocols, Chapter 2.) As one example of such methods, cells expressing polypeptide of the present invention are administered to an animal to induce the production of sera containing polyclonal antibodies. In a preferred method, a preparation of polypeptide of the present invention is prepared and purified to render it substantially free of natural contaminants. Such a preparation is then introduced into an animal in order to produce polyclonal antisera of greater specific activity.

[0966] Monoclonal antibodies specific for polypeptide of the present invention are prepared using hybridoma technology (Kohler et al., Nature 256:495 (1975); Kohler et al., Eur. J. Immunol. 6:511 (1976); Kohler et al., Eur. J. Immunol. 6:292 (1976); Hammerling et al., in: Monoclonal Antibodies and T-Cell Hybridomas, Elsevier, N.Y., pp. 563-681 (1981)). In general, an animal (preferably a mouse) is immunized with polypeptide of the present invention or, more preferably, with a secreted polypeptide of the present invention-expressing, cell. Such polypeptide-expressing cells are cultured in any suitable tissue culture medium, preferably in Earle's modified Eagle's medium supplemented with 10% fetal bovine serum (inactivated at about 56° C.), and supplemented with about 10 g/l of nonessential amino acids, about 1,000 U/ml of penicillin, and about 100 μg/ml of streptomycin.

[0967] The splenocytes of such mice are extracted and fused with a suitable myeloma cell line. Any suitable myeloma cell line may be employed in accordance with the present invention; however, it is preferable to employ the parent myeloma cell line (SP20), available from the ATCC. After fusion, the resulting hybridoma cells are selectively maintained in HAT medium, and then cloned by limiting dilution as described by Wands et al. (Gastroenterology 80:225-232 (1981)). The hybridoma cells obtained through such a selection are then assayed to identify clones which secrete antibodies capable of binding the polypeptide of the present invention.

[0968] Alternatively, additional antibodies capable of binding to polypeptide of the present invention can be produced in a two-step procedure using anti-idiotypic antibodies. Such a method makes use of the fact that antibodies are themselves antigens, and therefore, it is possible to obtain an antibody which binds to a second antibody. In accordance with this method, protein specific antibodies are used to immunize an animal, preferably a mouse. The splenocytes of such an animal are then used to produce hybridoma cells, and the hybridoma cells are screened to identify clones which produce an antibody whose ability to bind to the polypeptide of the present invention-specific antibody can be blocked by polypeptide of the present invention. Such antibodies comprise anti-idiotypic antibodies to the polypeptide of the present invention-specific antibody and are used to immunize an animal to induce formation of further polypeptide of the present invention-specific antibodies.

[0969] For in vivo use of antibodies in humans, an antibody is “humanized”. Such antibodies can be produced using genetic constructs derived from hybridoma cells producing the monoclonal antibodies described above. Methods for producing chimeric and humanized antibodies are known in the art and are discussed herein. (See, for review, Morrison, Science 229:1202 (1985); Oi et al., BioTechniques 4:214 (1986); Cabilly et al., U.S. Patent No. 4,816,567; Taniguchi et al., EP 171496; Morrison et al., EP 173494; Neuberger et al., WO 8601533; Robinson et al., International Publication No. WO 8702671; Boulianne et al., Nature 312:643 (1984); Neuberger et al., Nature 314:268 (1985).)

[0970] Isolation of Antibody Fragments Directed Against Polypeptide of the Present Invention from a Library of scFvs

[0971] Naturally occurring V-genes isolated from human PBLs are constructed into a library of antibody fragments which contain reactivities against polypeptide of the present invention to which the donor may or may not have been exposed (see e.g., U.S. Pat. No. 5,885,793 incorporated herein by reference in its entirety).

[0972] Rescue of the Library.

[0973] A library of scFvs is constructed from the RNA of human PBLs as described in International Publication No. WO 92/01047. To rescue phage displaying antibody fragments, approximately 10⁹ E. coli harboring the phagemid are used to inoculate 50 ml of 2xTY containing 1% glucose and 100 μg/ml of ampicillin (2xTY-AMP-GLU) and grown to an O.D. of 0.8 with shaking. Five ml of this culture is used to inoculate 50 ml of 2× TY-AMP-GLU, 2×10⁸ TU of delta gene 3 helper (M13 delta gene III, see International Publication No. WO 92/01047) are added and the culture incubated at 37° C. for 45 minutes without shaking and then at 37° C. for 45 minutes with shaking. The culture is centrifuged at 4000 r.p.m. for 10 min. and the pellet resuspended in 2 liters of 2× TY containing 100 μg/ml ampicillin and 50 ug/ml kanamycin and grown overnight. Phage are prepared as described in International Application No. WO 92/01047.

[0974] M13 delta gene III is prepared as follows: M13 delta gene III helper phage does not encode gene III protein, hence the phage(mid) displaying antibody fragments have a greater avidity of binding to antigen. Infectious M13 delta gene III particles are made by growing the helper phage in cells harboring a pUC 19 derivative supplying the wild type gene III protein during phage morphogenesis. The culture is incubated for 1 hour at 37° C. without shaking and then for a further hour at 37° C. with shaking. Cells are spun down (IEC-Centra 8,400 r.p.m. for 10 min), resuspended in 300 ml 2× TY broth containing 100 μg ampicillin/ml and 25 μg kanamycin/ml (2× TY-AMP-KAN) and grown overnight, shaking at 37° C. Phage particles are purified and concentrated i from the culture medium by two PEG-precipitations (Sambrook et al., 1990), resuspended in 2 ml PBS and passed through a 0.45 μm filter (Minisart NML; Sartorius) to give a final concentration of approximately 10¹³ transducing units/ml (ampicillin-resistant clones).

[0975] Panning of the Library.

[0976] Immunotubes (Nunc) are coated overnight in PBS with 4 ml of either 100 μg/ml or 10 μg/ml of a polypeptide of the present invention. Tubes are blocked with 2% Marvel-PBS for 2 hours at 37° C. and then washed 3 times in PBS. Approximately 10¹³ TU of phage is applied to the tube and incubated for 30 minutes at room temperature tumbling on an over and under turntable and then left to stand for another 1.5 hours. Tubes are washed 10 times with PBS 0.1% Tween-20 and 10 times with PBS. Phage are eluted by adding 1 ml of 100 mM triethylamine and rotating 15 minutes on an under and over turntable after which the solution is immediately neutralized with 0.5 ml of 1.0M Tris-HCl, pH 7.4. Phage are then used to infect 10 ml of mid-log E. coli TGl by incubating eluted phage with bacteria for 30 minutes at 37° C. The E. coli are then plated on TYE plates containing 1% glucose and 100 μg/ml ampicillin. The resulting bacterial library is then rescued with delta gene 3 helper phage as described above to prepare phage for a subsequent round of selection. This process is then repeated for a total of 4 rounds of affinity purification with tube-washing increased to 20 times with PBS, 0.1% Tween-20 and 20 times with PBS for rounds 3 and 4.

[0977] Characterization of Binders.

[0978] Eluted phage from the 3rd and 4th rounds of selection are used to infect E. coli HB 2151 and soluble scFv is produced (Marks, et al., 1991) from single colonies for assay. ELISAs are performed with microtitre plates coated with 10 pg/ml of the polypeptide of the present invention in 50 mM bicarbonate pH 9.6. Clones positive in ELISA are further characterized by PCR fingerprinting (see, e.g., International Application No. WO 92/01047) and then by sequencing. These ELISA positive clones may also be further characterized by techniques known in the art, such as, for example, epitope mapping, binding affinity, receptor signal transduction, ability to block or competitively inhibit antibody/antigen binding, and competitive agonistic or antagonistic activity.

### Example 11

### Method of Determining Alterations in a Gene Corresponding to a Polynucleotide

[0979] RNA isolated from entire families or individual patients presenting with a phenotype of interest (such as a disease) is isolated. cDNA is then generated from these RNA samples using protocols known in the art. (See, Sambrook.) The cDNA is then used as a template for PCR, employing primers surrounding regions of interest in SEQ ID NO:X; and/or the nucleotide sequence of the cDNA contained in Clone ID NO:Z. Suggested PCR conditions consist of 35 cycles at 95 degrees C for 30 seconds; 60-120 seconds at 52-58 degrees C; and 60-120 seconds at 70 degrees C, using buffer solutions described in Sidransky et al., Science 252:706 (1991).

[0980] PCR products are then sequenced using primers labeled at their 5′ end with T4 polynucleotide kinase, employing SequiTherm Polymerase (Epicentre Technologies). The intron-exon boundaries of selected exons is also determined and genomic PCR products analyzed to confirm the results. PCR products harboring suspected mutations are then cloned and sequenced to validate the results of the direct sequencing.

[0981] PCR products are cloned into T-tailed vectors as described in Holton et al., Nucleic Acids Research, 19:1156 (1991) and sequenced with T7 polymerase (United States Biochemical). Affected individuals are identified by mutations not present in unaffected individuals.

[0982] Genomic rearrangements are also observed as a method of determining alterations in a gene corresponding to a polynucleotide. Genomic clones isolated according to Example 2 are nick-translated with digoxigenindeoxy-uridine 5′-triphosphate (Boehringer Manheim), and FISH performed as described in Johnson et al., Methods Cell Biol. 35:73-99 (1991). Hybridization with the labeled probe is carried out using a vast excess of human cot-1 DNA for specific hybridization to the corresponding genomic locus.

[0983] Chromosomes are counterstained with 4,6-diamino-2-phenylidole and propidium iodide, producing a combination of C- and R-bands. Aligned images for precise mapping are obtained using a triple-band filter set (Chroma Technology, Brattleboro, Vt.) in combination with a cooled charge-coupled device camera (Photometrics, Tucson, Ariz.) and variable excitation wavelength filters. (Johnson et al., Genet. Anal. Tech. Appl., 8:75 (1991).) Image collection, analysis and chromosomal fractional length measurements are performed using the ISee Graphical Program System. (Inovision Corporation, Durham, N.C.) Chromosome alterations of the genomic region hybridized by the probe are identified as insertions, deletions, and translocations. These alterations are used as a diagnostic marker for an associated disease.

### Example 12

### Method of Detecting Abnormal Levels of a Polypeptide in a Biological Sample

[0984] A polypeptide of the present invention can be detected in a biological sample, and if an increased or decreased level of the polypeptide is detected, this polypeptide is a marker for a particular phenotype. Methods of detection are numerous, and thus, it is understood that one skilled in the art can modify the following assay to fit their particular needs.

[0985] For example, antibody-sandwich ELISAs are used to detect polypeptides in a sample, preferably a biological sample. Wells of a microtiter plate are coated with specific antibodies, at a final concentration of 0.2 to 10 ug/ml. The antibodies are either monoclonal or polyclonal and are produced by the method described in Example 10. The wells are blocked so that non-specific binding of the polypeptide to the well is reduced.

[0986] The coated wells are then incubated for >2 hours at RT with a sample containing the polypeptide. Preferably, serial dilutions of the sample should be used to validate results. The plates are then washed three times with deionized or distilled water to remove unbound polypeptide.

[0987] Next, 50 ul of specific antibody-alkaline phosphatase conjugate, at a concentration of 25-400 ng, is added and incubated for 2 hours at room temperature. The plates are again washed three times with deionized or distilled water to remove unbound conjugate.

[0988] Add 75 ul of 4-methylumbelliferyl phosphate (MUP) or p-nitrophenyl phosphate (NPP) substrate solution to each well and incubate 1 hour at room temperature. Measure the reaction by a microtiter plate reader. Prepare a standard curve, using serial dilutions of a control sample, and plot polypeptide concentration on the X-axis (log scale) and fluorescence or absorbance of the Y-axis (linear scale). Interpolate the concentration of the polypeptide in the sample using the standard curve.

### Example 13

### Formulation

[0989] The invention also provides methods of treatment and/or prevention of diseases or disorders (such as, for example, any one or more of the diseases or disorders disclosed herein) by administration to a subject of an effective amount of a Therapeutic. By therapeutic is meant polynucleotides or polypeptides of the invention (including fragments and variants), agonists or antagonists thereof, and/or antibodies thereto, in combination with a pharmaceutically acceptable carrier type (e.g., a sterile carrier).

[0990] The Therapeutic will be formulated and dosed in a fashion consistent with good medical practice, taking into account the clinical condition of the individual patient (especially the side effects of treatment with the Therapeutic alone), the site of delivery, the method of administration, the scheduling of administration, and other factors known to practitioners. The “effective amount” for purposes herein is thus determined by such considerations.

[0991] As a general proposition, the total pharmaceutically effective amount of the Therapeutic administered parenterally per dose will be in the range of about lug/kg/day to 10 mg/kg/day of patient body weight, although, as noted above, this will be subject to therapeutic discretion. More preferably, this dose is at least 0.01 mg/kg/day, and most preferably for humans between about 0.01 and 1 mg/kg/day for the hormone. If given continuously, the Therapeutic is typically administered at a dose rate of about 1 ug/kg/hour to about 50 ug/kg/hour, either by 1-4 injections per day or by continuous subcutaneous infusions, for example, using a mini-pump. An intravenous bag solution may also be employed. The length of treatment needed to observe changes and the interval following treatment for responses to occur appears to vary depending on the desired effect.

[0992] Therapeutics can be are administered orally, rectally, parenterally, intracistemally, intravaginally, intraperitoneally, topically (as by powders, ointments, gels, drops or transdermal patch), bucally, or as an oral or nasal spray. “Pharmaceutically acceptable carrier” refers to a non-toxic solid, semisolid or liquid filler, diluent, encapsulating material or formulation auxiliary of any. The term “parenteral” as used herein refers to modes of administration which include intravenous, intramuscular, intraperitoneal, intrasternal, subcutaneous and intraarticular injection and infusion.

[0993] Therapeutics of the invention are also suitably administered by sustained-release systems. Suitable examples of sustained-release Therapeutics are administered orally, rectally, parenterally, intracistemally, intravaginally, intraperitoneally, topically (as by powders, ointments, gels, drops or transdermal patch), bucally, or as an oral or nasal spray. “Pharmaceutically acceptable carrier” refers to a non-toxic solid, semisolid or liquid filler, diluent, encapsulating material or formulation auxiliary of any type. The term “parenteral” as used herein refers to modes of administration which include intravenous, intramuscular, intraperitoneal, intrasternal, subcutaneous and intraarticular injection and infusion.

[0994] Therapeutics of the invention are also suitably administered by sustained-release systems. Suitable examples of sustained-release Therapeutics include suitable polymeric materials (such as, for example, semi-permeable polymer matrices in the form of shaped articles, e.g., films, or mirocapsules), suitable hydrophobic materials (for example as an emulsion in an acceptable oil) or ion exchange resins, and sparingly soluble derivatives (such as, for example, a sparingly soluble salt).

[0995] Sustained-release matrices include polylactides (U.S. Pat. No. 3,773,919, EP 58,481), copolymers of L-glutamic acid and gamma-ethyl-L-glutamate (Sidman et al., Biopolymers 22:547-556 (1983)), poly (2-hydroxyethyl methacrylate) (Langer et al., J. Biomed. Mater. Res. 15:167-277 (1981), and Langer, Chem. Tech. 12:98-105 (1982)), ethylene vinyl acetate (Langer et al., Id.) or poly-D-(−)-3-hydroxybutyric acid (EP 133,988).

[0996] Sustained-release Therapeutics also include liposomally entrapped Therapeutics of the invention (see generally, Langer, Science 249:1527-1533 (1990); Treat et al., in Liposomes in the Therapy of Infectious Disease and Cancer, Lopez-Berestein and Fidler (eds.), Liss, New York, pp. 317 -327 and 353-365 (1989)). Liposomes containing the Therapeutic are prepared by methods known per se: DE 3,218,121; Epstein et al., Proc. Natl. Acad. Sci. (USA) 82:3688-3692 (1985); Hwang et al., Proc. Natl. Acad. Sci.(USA) 77:4030-4034 (1980); EP 52,322; EP 36,676; EP 88,046; EP 143,949; EP 142,641; Japanese Pat. Appl. 83-118008; U.S. Pat. Nos. 4,485,045 and 4,544,545; and EP 102,324. Ordinarily, the liposomes are of the small (about 200-800 Angstroms) unilamellar type in which the lipid content is greater than about 30 mol. percent cholesterol, the selected proportion being adjusted for the optimal Therapeutic.

[0997] In yet an additional embodiment, the Therapeutics of the invention are delivered by way of a pump (see Langer, supra; Sefton, CRC Crit. Ref. Biomed. Eng. 14:201 (1987); Buchwald et al., Surgery 88:507 (1980); Saudek et al., N. Engl. J. Med. 321:574 (1989)).

[0998] Other controlled release systems are discussed in the review by Langer (Science 249:1527-1533 (1990)).

[0999] For parenteral administration, in one embodiment, the Therapeutic is formulated generally by mixing it at the desired degree of purity, in a unit dosage injectable form (solution, suspension, or emulsion), with a pharmaceutically acceptable carrier, i.e., one that is non-toxic to recipients at the dosages and concentrations employed and is compatible with other ingredients of the formulation. For example, the formulation preferably does not include oxidizing agents and other compounds that are known to be deleterious to the Therapeutic.

[1000] Generally, the formulations are prepared by contacting the Therapeutic uniformly and intimately with liquid carriers or finely divided solid carriers or both. Then, if necessary, the product is shaped into the desired formulation. Preferably the carrier is a parenteral carrier, more preferably a solution that is isotonic with the blood of the recipient. Examples of such carrier vehicles include water, saline, Ringer's solution, and dextrose solution. Non-aqueous vehicles such as fixed oils and ethyl oleate are also useful herein, as well as liposomes.

[1001] The carrier suitably contains minor amounts of additives such as substances that enhance isotonicity and chemical stability. Such materials are non-toxic to recipients at the dosages and concentrations employed, and include buffers such as phosphate, citrate, succinate, acetic acid, and other organic acids or their salts; antioxidants such as ascorbic acid; low molecular weight (less than about ten residues) polypeptides, e.g., polyarginine or tripeptides; proteins, such as serum albumin, gelatin, or immunoglobulins; hydrophilic polymers such as polyvinylpyrrolidone; amino acids, such as glycine, glutamic acid, aspartic acid, or arginine; monosaccharides, disaccharides, and other carbohydrates including cellulose or its derivatives, glucose, manose, or dextrins; chelating agents such as EDTA; sugar alcohols such as mannitol or sorbitol; counterions such as sodium; and/or nonionic surfactants such as polysorbates, poloxamers, or PEG.

[1002] The Therapeutic is typically formulated in such vehicles at a concentration of about 0.1 mg/ml to 100 mg/ml, preferably 1-10 mg/ml, at a pH of about 3 to 8. It will be understood that the use of certain of the foregoing excipients, carriers, or stabilizers will result in the formation of polypeptide salts.

[1003] Any pharmaceutical used for therapeutic administration can be sterile. Sterility is readily accomplished by filtration through sterile filtration membranes (e.g., 0.2 micron membranes). Therapeutics generally are placed into a container having a sterile access port, for example, an intravenous solution bag or vial having a stopper pierceable by a hypodermic injection needle.

[1004] Therapeutics ordinarily will be stored in unit or multi-dose containers, for example, sealed ampoules or vials, as an aqueous solution or as a lyophilized formulation for reconstitution. As an example of a lyophilized formulation, 10-ml vials are filled with 5 ml of sterile-filtered 1% (w/v) aqueous Therapeutic solution, and the resulting mixture is lyophilized. The infusion solution is prepared by reconstituting the lyophilized Therapeutic using bacteriostatic Water-for-Injection.

[1005] The invention also provides a pharmaceutical pack or kit comprising one or more containers filled with one or more of the ingredients of the Therapeutics of the invention. Associated with such container(s) can be a notice in the form prescribed by a governmental agency regulating the manufacture, use or sale of pharmaceuticals or biological products, which notice reflects approval by the agency of manufacture, use or sale for human administration. In addition, the Therapeutics may be employed in conjunction with other therapeutic compounds.

[1006] The Therapeutics of the invention may be administered alone or in combination with adjuvants. Adjuvants that may be administered with the Therapeutics of the invention include, but are not limited to, alum, alum plus deoxycholate (ImmunoAg), MTP-PE (Biocine Corp.), QS21 (Genentech, Inc.), BCG (e.g., THERACYS®), MPL and nonviable prepartions of Corynebacterium parvum. In a specific embodiment, Therapeutics of the invention are administered in combination with alum. In another specific embodiment, Therapeutics of the invention are administered in combination with QS-21. Further adjuvants that may be administered with the Therapeutics of the invention include, but are not limited to, Monophosphoryl lipid immunomodulator, AdjuVax 100a, QS-21, QS-18, CRL1005, Aluminum salts, MF-59, and Virosomal adjuvant technology. Vaccines that may be administered with the Therapeutics of the invention include, but are not limited to, vaccines directed toward protection against MMR (measles, mumps, rubella), polio, varicella, tetanus/diptheria, hepatitis A, hepatitis B, haemophilus influenzae B, whooping cough, pneumonia, influenza, Lyme's Disease, rotavirus, cholera, yellow fever, Japanese encephalitis, poliomyelitis, rabies, typhoid fever, and pertussis. Combinations may be administered either concomitantly, e.g., as an admixture, separately but simultaneously or concurrently; or sequentially. This includes presentations in which the combined agents are administered together as a therapeutic mixture, and also procedures in which the combined agents are administered separately but simultaneously, e.g., as through separate intravenous lines into the same individual. Administration “in combination” further includes the separate administration of one of the compounds or agents given first, followed by the second.

[1007] The Therapeutics of the invention may be administered alone or in combination with other therapeutic agents. Therapeutic agents that may be administered in combination with the Therapeutics of the invention, include but not limited to, chemotherapeutic agents, antibiotics, steroidal and non-steroidal anti-inflammatories, conventional immunotherapeutic agents, and/or therapeutic treatments described-below. Combinations may be administered either concomitantly, e.g., as an admixture, separately but simultaneously or concurrently; or sequentially. This includes presentations in which the combined agents are administered together as a therapeutic mixture, and also procedures in which the combined agents are administered separately but simultaneously, e.g., as through separate intravenous lines into the same individual. Administration “in combination” further includes the separate administration of one of the compounds or agents given first, followed by the second.

[1008] In certain embodiments, Therapeutics of the invention are administered in combination with antiretroviral agents, nucleoside/nucleotide reverse transcriptase inhibitors (NRTIs), non-nucleoside reverse transcriptase inhibitors (NNRTIs), and/or protease inhibitors (PIs). NRTIs that may be administered in combination with the Therapeutics of the invention, include, but are not limited to, RETROVIR™ (zidovudine/AZT), VIDEX™ (didanosine/ddl), HIVID™ (zalcitabine/ddC), ZERIT™ (stavudine/d4T), EPIVIR™ (lamivudine/3TC), and COMBIVIR™ (zidovudine/lamivudine). NNRTIs that may be administered in combination with the Therapeutics of the invention, include, but are not limited to, VIRAMUNE™ (nevirapine), RESCRIPTOR™ (delavirdine), and SUSTIVA™ (efavirenz). Protease inhibitors that may be administered in combination with the Therapeutics of the invention, include, but are not limited to, CRIXIVAN™ (indinavir), NORVIR™ (ritonavir), INVIRASE™ (saquinavir), and VIRACEPT™ (nelfinavir). In a specific embodiment, antiretroviral agents, nucleoside reverse transcriptase inhibitors, non-nucleoside reverse transcriptase inhibitors, and/or protease inhibitors may be used in any combination with Therapeutics of the invention to treat AIDS and/or to prevent or treat HIV infection.

[1009] Additional NRTIs include LODENOSINE™ (F-ddA; an acid-stable adenosine NRTI; Triangle/Abbott; COVIRACIL™ (emtricitabine/FTC; structurally related to lamivudine (3TC) but with 3- to 10-fold greater activity in vitro; Triangle/Abbott); dOTC (BCH-10652, also structurally related to lamivudine but retains activity against a substantial proportion of lamivudine-resistant isolates; Biochem Pharma); Adefovir (refused approval for anti-HIV therapy by FDA; Gilead Sciences); PREVEON® (Adefovir Dipivoxil, the active prodrug of adefovir; its active form is PMEA-pp); TENOFOVIR™ (bis-POC PMPA, a PMPA prodrug; Gilead); DAPD/DXG (active metabolite of DAPD; Triangle/Abbott); D-D4FC (related to 3TC, with activity against AZT/3TC-resistant virus); GW420867X (Glaxo Wellcome); ZIAGEN™ (abacavir/159U89; Glaxo Wellcome Inc.); CS-87 (3′azido-2′,3′-dideoxyuridine; WO 99/66936); and S-acyl-2-thioethyl (SATE)-bearing prodrug forms of β-L-FD4C and β-L-FddC (WO 98/17281).

[1010] Additional NNRTIs include COACTINON™ (Emivirine/MKC-442, potent NNRTI of the HEPT class; Triangle/Abbott); CAPRAVIRINE™ (AG-1549/S-1153, a next generation NNRTI with activity against viruses containing the K103N mutation; Agouron); PNU-142721 (has 20- to 50-fold greater activity than its predecessor delavirdine and is active against K103N mutants; Pharmacia & Upjohn); DPC-961 and DPC-963 (second-generation derivatives of efavirenz, designed to be active against viruses with the K103N mutation; DuPont); GW-420867X (has 25-fold greater activity than HBY097 and is active against K103N mutants; Glaxo Wellcome); CALANOLIDE A (naturally occurring agent from the latex tree; active against viruses containing either or both the Y181C and K103N mutations); and Propolis (WO 99/49830).

[1011] Additional protease inhibitors include LOPINAVIR ^{T} (ABT378/r; Abbott Laboratories); BMS-232632 (an azapeptide; Bristol-Myres Squibb); TIPRANAVIR™ (PNU-140690, a non-peptic dihydropyrone; Pharmacia & Upjohn); PD-178390 (a nonpeptidic dihydropyrone; Parke-Davis); BMS 232632 (an azapeptide; Bristol-Myers Squibb); L-756,423 (an indinavir analog; Merck); DMP-450 (a cyclic urea compound; Avid & DuPont); AG-1776 (a peptidomimetic with in vitro activity against protease inhibitor-resistant viruses; Agouron); VX-175/GW-433908 (phosphate prodrug of amprenavir; Vertex & Glaxo Welcome); CGP61755 (Ciba); and AGENERASE™ (amprenavir; Glaxo Wellcome Inc.).

[1012] Additional antiretroviral agents include fusion inhibitors/gp4l binders. Fusion inhibitors/gp4l binders include T-20 (a peptide from residues 643-678 of the HIV gp41 transmembrane protein ectodomain which binds to gp41 in its resting state and prevents transformation to the fusogenic state; Trimeris) and T-1249 (a second-generation fusion inhibitor; Trimeris).

[1013] Additional antiretroviral agents include fusion inhibitors/chemokine receptor antagonists. Fusion inhibitors/chemokine receptor antagonists include CXCR4 antagonists such as AMD 3100 (a bicyclam), SDF-1 and its analogs, and ALX40-4C (a cationic peptide), T22 (an 18 amino acid peptide; Trimeris) and the T22 analogs T134 and T140; CCR5 antagonists such as RANTES (9-68), AOP-RANTES, NNY-RANTES, and TAK-779; and CCR5/CXCR4 antagonists such as NSC 651016 (a distamycin analog). Also included are CCR2B, CCR3, and CCR6 antagonists. Chemokine recpetor agonists such as RANTES, SDF-1, MIP-1α, MIP-1β, etc., may also inhibit fusion.

[1014] Additional antiretroviral agents include integrase inhibitors. Integrase inhibitors include dicaffeoylquinic (DFQA) acids; L-chicoric acid (a dicaffeoyltartaric (DCTA) acid); quinalizarin (QLC) and related anthraquinones; ZINTEVIR™ (AR 177, an oligonucleotide that probably acts at cell surface rather than being a true integrase inhibitor; Arondex); and naphthols such as those disclosed in WO 98/50347.

[1015] Additional antiretroviral agents include hydroxyurea-like compunds such as BCX-34 (a purine nucleoside phosphorylase inhibitor; Biocryst); ribonucleotide reductase inhibitors such as DIDQX™ (Molecules for Health); inosine monophosphate dehydrogenase (IMPDH) inhibitors sucha as VX-497 (Vertex); and myvopholic acids such as CellCept (mycophenolate mofetil; Roche).

[1016] Additional antiretroviral agents include inhibitors of viral integrase, inhibitors of viral genome nuclear translocation such as arylene bis(methylketone) compounds; inhibitors of HIV entry such as AOP-RANTES, NNY-RANTES, RANTES-IgG fusion protein, soluble complexes of RANTES and glycosaminoglycans (GAG), and AMD-3100; nucleocapsid zinc finger inhibitors such as dithiane compounds; targets of HIV Tat and Rev; and pharmacoenhancers such as ABT-378.

[1017] Other antiretroviral therapies and adjunct therapies include cytokines and lymphokines such as MIP-1α, MIP-1β, SDF-1α, IL-2, PROLEUKIN™ (aldesleukin/L2-7001; Chiron), IL-4, IL-10, IL-12, and IL-13; interferons such as IFN-α2a; antagonists of TNFs, NFκB, GM-CSF, M-CSF, and IL-10; agents that modulate immune activation such as cyclosporin and prednisone; vaccines such as Remune™ (HIV Immunogen), APL 400-003 (Apollon), recombinant gp120 and fragments, bivalent (BIE) recombinant envelope glycoprotein, rgp120CM235, MN rgpl20, SF-2 rgp120, gp120/soluble CD4 complex, Delta JR-FL protein, branched synthetic peptide derived from discontinuous gp120 C3/C4 domain, fusion-competent immunogens, and Gag, Pol, Nef, and Tat vaccines; gene-based therapies such as genetic suppressor elements (GSEs; WO 98/54366), and intrakines (genetically modified CC chemokines targetted to the ER to block surface expression of newly synthesized CCR5 (Yang et al., PNAS 94:11567-72 (1997); Chen et al., Nat. Med. 3:1110-16 (1997)); antibodies such as the anti-CXCR4 antibody 12G5, the anti-CCR5 antibodies 2D7, 5C7, PA8, PA9, PA10, PA11, PA12, and PA14, the anti-CD4 antibodies Q4120 and RPA-T4, the anti-CCR3 antibody 7B11, the anti-gp120 antibodies 17b, 48d, 447-52D, 257-D, 268-D and 50.1, anti-Tat antibodies, anti-TNF-α antibodies, and monoclonal antibody 33A; aryl hydrocarbon (AH) receptor agonists and antagonists such as TCDD, 3,3′,4,4′,5-pentachlorobiphenyl, 3,3′,4,4′-tetrachlorobiphenyl, and α-naphthoflavone (WO 98/30213); and antioxidants such as γ-L-glutamyl-L-cysteine ethyl ester (γ-GCE; WO 99/56764).

[1018] In a further embodiment, the Therapeutics of the invention are administered in combination with an antiviral agent. Antiviral agents that may be administered with the Therapeutics of the invention include, but are not limited to, acyclovir, ribavirin, amantadine, and remantidine.

[1019] In other embodiments, Therapeutics of the invention may be administered in combination with anti-opportunistic infection agents. Anti-opportunistic agents that may be administered in combination with the Therapeutics of the invention, include, but are not limited to, TRIMETHOPRIM-SULFAMETHOXAZOLE™, DAPSONE™, PENTAMIDINE™, ATOVAQUONE™, ISONIAZID™, RIFAMPIN™, PYRAZINAMIDE™, ETHAMBUTOL™, RIFABUTIN™, CLARITHROMYCIN™, AZITHROMYCIN™, GANCICLOVIR™, FOSCARNET™, CIDOFOVIR™, FLUCONAZOLE™, ITRACONAZOLE™, KETOCONAZOLE™, ACYCLOVIR™, FAMCICOLVIR™, PYRIMETHAMINE™, LEUCOVORIN™, NEUPOGEN™ (filgrastim/G-CSF), and LEUKINE™ (sargramostim/GM-CSF). In a specific embodiment, Therapeutics of the invention are used in any combination with TRIMETHOPRIM-SULFAMETHOXAZOLE™, DAPSONE™, PENTAMIDINE™, and/or ATOVAQUONE™ to prophylactically treat or prevent an opportunistic Pneumocystis carinii pneumonia infection. In another specific embodiment, Therapeutics of the invention are used in any combination with ISONIAZID™, RIFAMPIN™, PYRAZINAMIDE™, and/or ETHAMBUTOL™ to prophylactically treat or prevent an opportunistic Mycobacterium avium complex infection. In another specific embodiment, Therapeutics of the invention are used in any combination with RIFABUTIN™, CLARITHROMYCIN™, and/or AZITHROMYCIN™ to prophylactically treat or prevent an opportunistic Mycobacterium tuberculosis infection. In another specific embodiment, Therapeutics of the invention are used in any combination with GANCICLOVIR™, FOSCARNET™, and/or CIDOFOVIR™ to prophylactically treat or prevent an opportunistic cytomegalovirus infection. In another specific embodiment, Therapeutics of the invention are used in any combination with FLUCONAZOLE™, ITRACONAZOLE™, and/or KETOCONAZOLE™ to prophylactically treat or prevent an opportunistic fungal infection. In another specific embodiment, Therapeutics of the invention are used in any combination with ACYCLOVIR™ and/or FAMCICOLVIR™ to prophylactically treat or prevent an opportunistic herpes simplex virus type I and/or type II infection. In another specific embodiment, Therapeutics of the invention are used in any combination with PYRIMETHAMINE™ and/or LEUCOVORIN™ to prophylactically treat or prevent an opportunistic Toxoplasma gondii infection. In another specific embodiment, Therapeutics of the invention are used in any combination with LEUCOVORIN™ and/or NEUPOGEN™ to prophylactically treat or prevent an opportunistic bacterial infection.

[1020] In a further embodiment, the Therapeutics of the invention are administered in combination with an antibiotic agent. Antibiotic agents that may be administered with the Therapeutics of the invention include, but are not limited to, amoxicillin, beta-lactamases, aminoglycosides, beta-lactam (glycopeptide), beta-lactamases, Clindamycin, chloramphenicol, cephalosporins, ciprofloxacin, ciprofloxacin, erythromycin, fluoroquinolones, macrolides, metronidazole, penicillins, quinolones, rapamycin, rifampin, streptomycin, sulfonamide, tetracyclines, trimethoprim, trimethoprim-sulfamthoxazole, and vancomycin.

[1021] In other embodiments, Therapeutics of the invention are administered in combination with immunosuppressive agents. Immunosuppressive agents that may be administered in combination with the Therapeutics of the invention include, but are not limited to, steroids, cyclosporine, cyclosporine analogs, cyclophosphamide methylprednisone, prednisone, azathioprine, FK-506, 15-deoxyspergualin, and other immunosuppressive agents that act by suppressing the function of responding T cells. Other immunosuppressive agents that may be administered in combination with the Therapeutics of the invention include, but are not limited to, prednisolone, methotrexate, thalidomide, methoxsalen, rapamycin, leflunomide, mizoribine (BREDININTM), brequinar, deoxyspergualin, and azaspirane (SKF 105685), ORTHOCLONE OKT® 3 (muromonab-CD3), SANDIMMUNE™, NEORAL™, SANGDYA™ (cyclosporine), PROGRAF® (FK506, tacrolimus), CELLCEPT® (mycophenolate motefil, of which the active metabolite is mycophenolic acid), IMURAN™ (azathioprine), glucocorticosteroids, adrenocortical steroids such as DELTASONE™ (prednisone) and HYDELTRASOL™ (prednisolone), FOLEX™ and MEXATE™ (methotrxate), OXSORALEN-ULTRAT™ (methoxsalen) and RAPANIUNE™ (sirolimus). In a specific embodiment, immunosuppressants may be used to prevent rejection of organ or bone marrow transplantation.

[1022] In an additional embodiment, Therapeutics of the invention are administered alone or in combination with one or more intravenous immune globulin preparations. Intravenous immune globulin preparations that may be administered with the Therapeutics of the invention include, but not limited to, GAMMAR™, IVEEGAM™, SANDOGLOBULIN™, GAMMAGARD S/D™, ATGAM™ (antithymocyte glubulin), and GAMIMUNE™. In a specific embodiment, Therapeutics of the invention are administered in combination with intravenous immune globulin preparations in transplantation therapy (e.g., bone marrow transplant).

[1023] In certain embodiments, the Therapeutics of the invention are administered alone or in combination with an anti-inflammatory agent. Anti-inflammatory agents that may be administered with the Therapeutics of the invention include, but are not limited to, corticosteroids (e.g. betamethasone, budesonide, cortisone, dexamethasone, hydrocortisone, methylprednisolone, prednisolone, prednisone, and triamcinolone), nonsteroidal anti-inflammatory drugs (e.g., diclofenac, diflunisal, etodolac, fenoprofen, floctafenine, flurbiprofen, ibuprofen, indomethacin, ketoprofen, meclofenamate, mefenamic acid, meloxicam, nabumetone, naproxen, oxaprozin, phenylbutazone, piroxicam, sulindac, tenoxicam, tiaprofenic acid, and tolmetin.), as well as antihistamines, aminoarylcarboxylic acid derivatives, arylacetic acid derivatives, arytbutyric acid derivatives, arylcarboxylic acids, arylpropionic acid derivatives, pyrazoles, pyrazolones, salicylic acid derivatives, thiazinecarboxamides, e-acetamidocaproic acid, S-adenosylmethionine, 3-amino-4-hydroxybutyric acid, amixetrine, bendazac, benzydamine, bucolome, difenpiramide, ditazol, emorfazone, guaiazulene, nabumetone, nimesulide, orgotein, oxaceprol, paranyline, perisoxal, pifoxime, proquazone, proxazole, and tenidap.

[1024] In an additional embodiment, the compositions of the invention are administered alone or in combination with an anti-angiogenic agent. Anti-angiogenic agents that may be administered with the compositions of the invention include, but are not limited to, Angiostatin (Entremed, Rockville, Md.), Troponin-1 (Boston Life Sciences, Boston, Mass.), anti-Invasive Factor, retinoic acid and derivatives thereof, paclitaxel (Taxol), Suramin, Tissue Inhibitor of Metalloproteinase-1, Tissue Inhibitor of Metalloproteinase-2, VEGI, Plasminogen Activator Inhibitor-1, Plasminogen Activator Inhibitor-2, and various forms of the lighter “d group” transition metals.

[1025] Lighter “d group” transition metals include, for example, vanadium, molybdenum, tungsten, titanium, niobium, and tantalum species. Such transition metal species may form transition metal complexes. Suitable complexes of the above-mentioned transition metal species include oxo transition metal complexes.

[1026] Representative examples of vanadium complexes include oxo vanadium complexes such as vanadate and vanadyl complexes. Suitable vanadate complexes include metavanadate and orthovanadate complexes such as, for example, ammonium metavanadate, sodium metavanadate, and sodium orthovanadate. Suitable vanadyl complexes include, for example, vanadyl acetylacetonate and vanadyl sulfate including vanadyl sulfate hydrates such as vanadyl sulfate mono- and trihydrates.

[1027] Representative examples of tungsten and molybdenum complexes also include oxo complexes. Suitable oxo tungsten complexes include tungstate and tungsten oxide complexes. Suitable tungstate complexes include ammonium tungstate, calcium tungstate, sodium tungstate dihydrate, and tungstic acid. Suitable tungsten oxides include tungsten (IV) oxide and tungsten (VI) oxide. Suitable oxo molybdenum complexes include molybdate, molybdenum oxide, and molybdenyl complexes. Suitable molybdate complexes include ammonium molybdate and its hydrates, sodium molybdate and its hydrates, and potassium molybdate and its hydrates. Suitable molybdenum oxides include molybdenum (VI) oxide, molybdenum (VI) oxide, and molybdic acid. Suitable molybdenyl complexes include, for example, molybdenyl acetylacetonate. Other suitable tungsten and molybdenum complexes include hydroxo derivatives derived from, for example, glycerol, tartaric acid, and sugars.

[1028] A wide variety of other anti-angiogenic factors may also be utilized within the context of the present invention. Representative examples include, but are not limited to, platelet factor 4; protamine sulphate; sulphated chitin derivatives (prepared from queen crab shells), (Murata et al., Cancer Res. 51:22-26, (1991)); Sulphated Polysaccharide Peptidoglycan Complex (SP-PG) (the function of this compound may be enhanced by the presence of steroids such as estrogen, and tamoxifen citrate); Staurosporine; modulators of matrix metabolism, including for example, proline analogs, cishydroxyproline, d,L-3,4-dehydroproline, Thiaproline, alpha,alpha-dipyridyl, aminopropionitrile fumarate; 4-propyl-5-(4-pyridinyl)-2(3H)-oxazolone; Methotrexate; Mitoxantrone; Heparin; Interferons; 2 Macroglobulin-serum; ChIMP-3 (Pavloff et al., J. Bio. Chem. 267:17321-17326, (1992)); Chymostatin (Tomkinson et al., Biochem J. 286:475-480, (1992)); Cyclodextrin Tetradecasulfate; Eponemycin; Camptothecin; Fumagillin (Ingber et al., Nature 348:555-557, (1990)); Gold Sodium Thiomalate (“GST”; Matsubara and Ziff, J. Clin. Invest. 79:1440-1446, (1987)); anticollagenase-serum; alpha2-antiplasmin (Holmes et al., J. Biol. Chem. 262(4):1659-1664, (1987)); Bisantrene (National Cancer Institute); Lobenzarit disodium (N-(2)-carboxyphenyl-4-chloroanthronilic acid disodium or “CCA”; (Takeuchi et al., Agents Actions 36:312-316, (1992)); and metalloproteinase inhibitors such as BB94.

[1029] Additional anti-angiogenic factors that may also be utilized within the context of the present invention include Thalidomide, (Celgene, Warren, N.J.); Angiostatic steroid; AGM-1470 (H. Brem and J. Folkman JPediatr. Surg. 28:445-51 (1993)); an integrin alpha v beta 3 antagonist (C. Storgard et al., J Clin. Invest. 103:47-54 (1999)); carboxynaminolmidazole; Carboxyamidotriazole (CAI) (National Cancer Institute, Bethesda, Md.); Conbretastatin A-4 (CA4P) (OXiGENE, Boston, Mass.); Squalamine (Magainin Pharmaceuticals, Plymouth Meeting, Pa.); TNP-470, (Tap Pharmaceuticals, Deerfield, Ill.); ZD-0101 AstraZeneca (London, UK); APRA (CT2584); Benefin, Byrostatin-l (SC339555); CGP-41251 (PKC 412); CM101; Dexrazoxane (ICRF 187); DMXAA; Endostatin; Flavopridiol; Genestein; GTE; ImmTher; Iressa (ZD1839); Octreotide (Somatostatin); Panretin; Penacillamine; Photopoint; PI-88; Prinomastat (AG-3340) Purlytin; Suradista (FCE26644); Tamoxifen (Nolvadex); Tazarotene; Tetrathiomolybdate; Xeloda (Capecitabine); and 5-Fluorouracil.

[1030] Anti-angiogenic agents that may be administed in combination with the compounds of the invention may work through a variety of mechanisms including, but not limited to, inhibiting proteolysis of the extracellular matrix, blocking the function of endothelial cell-extracellular matrix adhesion molecules, by antagonizing the function of angiogenesis inducers such as growth factors, and inhibiting integrin receptors expressed on proliferating endothelial cells. Examples of anti-angiogenic inhibitors that interfere with extracellular matrix proteolysis and which may be administered in combination with the compositons of the invention include, but are not lmited to, AG-3340 (Agouron, La Jolla, Calif.), BAY-12-9566 (Bayer, West Haven, Cinn.), BMS-275291 (Bristol Myers Squibb, Princeton, N.J.), CGS-27032A (Novartis, East Hanover, N.J.), Marimastat (British Biotech, Oxford, UK), and Metastat (Aetema, St-Foy, Quebec). Examples of anti-angiogenic inhibitors that act by blocking the function of endothelial cell-extracellular matrix adhesion molecules and which may be administered in combination with the compositons of the invention include, but are not Imited to, EMD-121974 (Merck KcgaA Darmstadt, Germany) and Vitaxin (Ixsys, La Jolla, Calif./Medimmune, Gaithersburg, Md.). Examples of anti-angiogenic agents that act by directly antagonizing or inhibiting angiogenesis inducers and which may be administered in combination with the compositons of the invention include, but are not lmited to, Angiozyme (Ribozyme, Boulder, Col.), Anti-VEGF antibody (Genentech, S. San Francisco, CA), PTK-787/ZK-225846 (Novartis, Basel, Switzerland), SU-101 (Sugen, S. San Francisco, Calif.), SU-5416 (Sugen/ Pharmacia Upjohn, Bridgewater, N.J.), and SU-6668 (Sugen). Other anti-angiogenic agents act to indirectly inhibit angiogenesis. Examples of indirect inhibitors of angiogenesis which may be administered in combination with the compositons of the invention include, but are not limited to, IM-862 (Cytran, Kirkland, Wash.), Interferon-alpha, IL-12 (Roche, Nutley, N.J.), and Pentosan polysulfate (Georgetown University, Washington, D.C.).

[1031] In particular embodiments, the use of compositions of the invention in combination with anti-angiogenic agents is contemplated for the treatment, prevention, and/or amelioration of an autoimmune disease, such as for example, an autoimmune disease described herein.

[1032] In a particular embodiment, the use of compositions of the invention in combination with anti-angiogenic agents is contemplated for the treatment, prevention, and/or amelioration of arthritis. In a more particular embodiment, the use of compositions of the invention in combination with anti-angiogenic agents is contemplated for the treatment, prevention, and/or amelioration of rheumatoid arthritis.

[1033] In another embodiment, the polynucleotides encoding a polypeptide of the present invention are administered in combination with an angiogenic protein, or polynucleotides encoding an angiogenic protein. Examples of angiogenic proteins that may be administered with the compositions of the invention include, but are not limited to, acidic and basic fibroblast growth factors, VEGF-1, VEGF-2, VEGF-3, epidermal growth factor alpha and beta, platelet-derived endothelial cell growth factor, platelet-derived growth factor, tumor necrosis factor alpha, hepatocyte growth factor, insulin-like growth factor, colony stimulating factor, macrophage colony stimulating factor, granulocyte/macrophage colony stimulating factor, and nitric oxide synthase.

[1034] In additional embodiments, compostions of the invention are administered in combination with a chemotherapeutic agent. Chemotherapeutic agents that may be administered with the Therapeutics of the invention include, but are not limited to alkylating agents such as nitrogen mustards (for example, Mechlorethamine, cyclophosphamide, Cyclophosphamide Ifosfamide, Melphalan (L-sarcolysin), and Chlorambucil), ethylenimines and methylmelamines (for example, Hexamethylmelamine and Thiotepa), alkyl sulfonates (for example, Busulfan), nitrosoureas (for example, Carmustine (BCNU), Lomustine (CCNU), Semustine (methyl-CCNU), and Streptozocin (streptozotocin)), triazenes (for example, Dacarbazine (DTIC; dimethyltriazenoimidazolecarboxamide)), folic acid analogs (for example, Methotrexate (amethopterin)), pyrimidine analogs (for example, Fluorouacil (5-fluorouracil; 5-FU), Floxuridine (fluorodeoxyuridine; FudR), and Cytarabine (cytosine arabinoside)), purine analogs and related inhibitors (for example, Mercaptopurine (6-mercaptopurine; 6-MP), Thioguanine (6-thioguanine; TG), and Pentostatin (2′-deoxycoformycin)), vinca alkaloids (for example, Vinblastine (VLB, vinblastine sulfate) and Vincristine (vincristine sulfate)), epipodophyllotoxins (for example, Etoposide and Teniposide), antibiotics (for example, Dactinomycin (actinomycin D), Daunorubicin (daunomycin; rubidomycin), Doxorubicin, Bleomycin, Plicamycin (mithramycin), and Mitomycin (mitomycin C), enzymes (for example, L-Asparaginase), biological response modifiers (for example, Interferon-alpha and interferon-alpha-2b), platinum coordination compounds (for example, Cisplatin (cis-DDP) and Carboplatin), anthracenedione (Mitoxantrone), substituted ureas (for example, Hydroxyurea), methylhydrazine derivatives (for example, Procarbazine (N-methylhydrazine; MIH), adrenocorticosteroids (for example, Prednisone), progestins (for example, Hydroxyprogesterone caproate, Medroxyprogesterone, Medroxyprogesterone acetate, and Megestrol acetate), estrogens (for example, Diethylstilbestrol (DES), Diethylstilbestrol diphosphate, Estradiol, and Ethinyl estradiol), antiestrogens (for example, Tamoxifen), androgens (Testosterone proprionate, and Fluoxymesterone), antiandrogens (for example, Flutamide), gonadotropin-releasing horomone analogs (for example, Leuprolide), other hormones and hormone analogs (for example, methyltestosterone, estramustine, estramustine phosphate sodium, chlorotrianisene, and testolactone), and others (for example, dicarbazine, glutamic acid, and mitotane).

[1035] In one embodiment, the compositions of the invention are administered in combination with one or more of the following drugs: infliximab (also known as RemicadeTm Centocor, Inc.), Trocade (Roche, RO-32-3555), Leflunomide (also known as AravaTM from Hoechst Marion Roussel), KineretTm (an IL-1 Receptor antagonist also known as Anakinra from Amgen, Inc.).

[1036] In a specific embodiment, compositions of the invention are administered in combination with CHOP (cyclophosphamide, doxorubicin, vincristine, and prednisone) or combination of one or more of the components of CHOP. In one embodiment, the compositions of the invention are administered in combination with anti-CD20 antibodies, human monoclonal anti-CD20 antibodies. In another embodiment, the compositions of the invention are administered in combination with anti-CD20 antibodies and CHOP, or anti-CD20 antibodies and any combination of one or more of the components of CHOP, particularly cyclophosphamide and/or prednisone. In a specific embodiment, compositions of the invention are administered in combination with Rituximab. In a further embodiment, compositions of the invention are administered with Rituximab and CHOP, or Rituximab and any combination of one or more of the components of CHOP, particularly cyclophosphamide and/or prednisone. In a specific embodiment, compositions of the invention are administered in combination with tositumomab. In a further embodiment, compositions of the invention are administered with tositumomab and CHOP, or tositumomab and any combination of one or more of the components of CHOP, particularly cyclophosphamide and/or prednisone. The anti-CD20 antibodies may optionally be associated with radioisotopes, toxins or cytotoxic prodrugs.

[1037] In another specific embodiment, the compositions of the invention are administered in combination Zevalin™. In a further embodiment, compositions of the invention are administered with Zevalin™ and CHOP, or Zevalin™ and any combination of one or more of the components of CHOP, particularly cyclophosphamide and/or prednisone. Zevalin™ may be associated with one or more radisotopes. Particularly preferred isotopes are ⁹⁰Y and ¹¹¹In.

[1038] In an additional embodiment, the Therapeutics of the invention are administered in combination with cytokines. Cytokines that may be administered with the Therapeutics of the invention include, but are not limited to, IL2, IL3, IL4, IL5, IL6, IL7, IL10, IL12, IL13, IL15, anti-CD40, CD40L, IFN-gamma and TNF-alpha. In another embodiment, Therapeutics of the invention may be administered with any interleukin, including, but not limited to, IL-1alpha, IL-1beta, IL-2, IL-3, IL-4, IL-5, IL-6, IL-7, IL-8, IL-9, IL-10, IL-11, IL-12, IL-13, IL-14, IL-15, IL-16, IL-17, IL-18, IL-19, IL-20, and IL-21.

[1039] In one embodiment, the Therapeutics of the invention are administered in combination with members of the TNF family. TNF, TNF-related or TNF-like molecules that may be administered with the Therapeutics of the invention include, but are not limited to, soluble forms of TNF-alpha, lymphotoxin-alpha (LT-alpha, also known as TNF-beta), LT-beta (found in complex heterotrimer LT-alpha2-beta), OPGL, FasL, CD27L, CD30L, CD40L, 4-1BBL, DcR3, OX40L, TNF-gamma (International Publication No. WO 96/14328), AIM-I (International Publication No. WO 97/33899), endokine-alpha (International Publication No. WO 98/07880), OPG, and neutrokine-alpha (International Publication No. WO 98/18921, OX40, and nerve growth factor (NGF), and soluble forms of Fas, CD30, CD27-, CD40 and 4-IBB, TR2 (International Publication No. WO 96/34095), DR3 (International Publication No. WO 97/33904), DR4 (International Publication No. WO 98132856), TR5 (International Publication No. WO 98/30693), TRANK, TR9 (International Publication No. WO 98/56892),TR10 (International Publication No. WO 98/54202), 312C2 (International Publication No. WO 98/06842), and TR12, and soluble forms CD154, CD70, and CD153.

[1040] In an additional embodiment, the Therapeutics of the invention are administered in combination with angiogenic proteins. Angiogenic proteins that may be administered with the Therapeutics of the invention include, but are not limited to, Glioma Derived Growth Factor (GDGF), as disclosed in European Patent Number EP-399816; Platelet Derived Growth Factor-A (PDGF-A), as disclosed in European Patent Number EP-682110; Platelet Derived Growth Factor-B (PDGF-B), as disclosed in European Patent Number EP-282317; Placental Growth Factor (PIGF), as disclosed in International Publication Number WO 92/06194; Placental Growth Factor-2 (PIGF-2), as disclosed in Hauser et al., Growth Factors, 4:259-268 (1993); Vascular Endothelial Growth Factor (VEGF), as disclosed in International Publication Number WO 90/13649; Vascular Endothelial Growth Factor-A (VEGF-A), as disclosed in European Patent Number EP-506477; Vascular Endothelial Growth Factor-2 (VEGF-2), as disclosed in International Publication Number WO 96/39515; Vascular Endothelial Growth Factor B (VEGF-3); Vascular Endothelial Growth Factor B-186 (VEGF-B186), as disclosed in International Publication Number WO 96/26736; Vascular Endothelial Growth Factor-D (VEGF-D), as disclosed in International Publication Number WO 98/02543; Vascular Endothelial Growth Factor-D (VEGF-D), as disclosed in International Publication Number WO 98/07832; and Vascular Endothelial Growth Factor-E (VEGF-E), as disclosed in German Patent Number DE19639601. The above mentioned references are herein incorporated by reference in their entireties.

[1041] In an additional embodiment, the Therapeutics of the invention are administered in combination with Fibroblast Growth Factors. Fibroblast Growth Factors that may be administered with the Therapeutics of the invention include, but are not limited to, FGF-1, FGF-2, FGF-3, FGF-4, FGF-5, FGF-6, FGF-7, FGF-8, FGF-9, FGF-10, FGF-11, FGF-12, FGF-13, FGF-14, and FGF-15.

[1042] In an additional embodiment, the Therapeutics of the invention are administered in combination with hematopoietic growth factors. Hematopoietic growth factors that may be administered with the Therapeutics of the invention include, but are not limited to, granulocyte macrophage colony stimulating factor (GM-CSF) (sargramostim, LEUKINE™, PROKINE™T), granulocyte colony stimulating factor (G-CSF) (filgrastim, NEUPOGEN™), macrophage colony stimulating factor (M-CSF, CSF-1) erythropoietin (epoetin alfa, EPOGEN™, PROCRIT™), stem cell factor (SCF, c-kit ligand, steel factor), megakaryocyte colony stimulating factor, PIXY321 (a GMCSF/IL-3 fusion protein), interleukins, especially any one or more of IL-1 through IL-12, interferon-gamma, or thrombopoietin.

[1043] In certain embodiments, Therapeutics of the present invention are administered in combination with adrenergic blockers, such as, for example, acebutolol, atenolol, betaxolol, bisoprolol, carteolol, labetalol, metoprolol, nadolol, oxprenolol, penbutolol, pindolol, propranolol, sotalol, and timolol.

[1044] In another embodiment, the Therapeutics of the invention are administered in combination with an antiarrhythmic drug (e.g., adenosine, amidoarone, bretylium, digitalis, digoxin, digitoxin, diliazem, disopyramide, esmolol, flecainide, lidocaine, mexiletine, moricizine, phenytoin, procainamide, N-acetyl procainamide, propafenone, propranolol, quinidine, sotalol, tocainide, and verapamil).

[1045] In another embodiment, the Therapeutics of the invention are administered in combination with diuretic agents, such as carbonic anhydrase-inhibiting agents (e.g., acetazolamide, dichlorphenamide, and methazolamide), osmotic diuretics (e.g., glycerin, isosorbide, mannitol, and urea), diuretics that inhibit Na⁺-K⁺-2Cl⁻ symport (e.g., furosemide, bumetanide, azosemide, piretanide, tripamide, ethacrynic acid, muzolimine, and torsemide), thiazide and thiazide-like diuretics (e.g., bendroflumethiazide, benzthiazide, chlorothiazide, hydrochlorothiazide, hydroflumethiazide, methyclothiazide, polythiazide, trichormethiazide, chlorthalidone, indapamide, metolazone, and quinethazone), potassium sparing diuretics (e.g., amiloride and triamterene), and mineralcorticoid receptor antagonists (e.g., spironolactone, canrenone, and potassium canrenoate).

[1046] In one embodiment, the Therapeutics of the invention are administered in combination with treatments for endocrine and/or hormone imbalance disorders. Treatments for endocrine and/or hormone imbalance disorders include, but are not limited to, ¹²⁷I, radioactive isotopes of iodine such as ¹³¹I and ¹²³I; recombinant growth hormone, such as HUMATROPE™ (recombinant somatropin); growth hormone analogs such as PROTROPIN™ (somatrem); dopamine agonists such as PARLODEL™ (bromocriptine); somatostatin analogs such as SANDOSTATIN™ (octreotide); gonadotropin preparations such as PREGNYL™, A.P.L.™ and PROFASI™ (chorionic gonadotropin (CG)), PERGONAL™ (menotropins), and METRODIN™ (urofollitropin (uFSH)); synthetic human gonadotropin releasing hormone preparations such as FACTREL™ and LUTREPULSE™ (gonadorelin hydrochloride); synthetic gonadotropin agonists such as LUPRON™ (leuprolide acetate), SUPPRELIN™ (histrelin acetate), SYNAREL™ (nafarelin acetate), and ZOLADEX™ (goserelin acetate); synthetic preparations of thyrotropin-releasing hormone such as RELEFACT TRH™ and THYPINONE™ (protirelin); recombinant human TSH such as THYROGEN™; synthetic preparations of the sodium salts of the natural isomers of thyroid hormones such as L-T₄™, SYNTHROID™ and LEVOTHROID™ (levothyroxine sodium), L-T₃™, CYTOMEL™ and TRIOSTAT™ (liothyroine sodium), and THYROLAR™ (liotrix); antithyroid compounds such as 6-n-propylthiouracil (propylthiouracil), 1-methyl-2-mercaptoimidazote and TAPAZOLE™ (methimazole), NEO-MERCAZOLE™ (carbimazole); beta-adrenergic receptor antagonists such as propranolol and esmolol; Ca²⁺ channel blockers; dexamethasone and iodinated radiological contrast agents such as TELEPAQUE™ (iopanoic acid) and ORAGRAFIN™ (sodium ipodate); estrogens or congugated estrogens such as ESTRACE™ (estradiol), ESTINYL™ (ethinyl estradiol), PREMARIN™, ESTRATAB™, ORTHO-EST™, OGEN™ and estropipate (estrone), ESTROVIS™ (quinestrol), ESTRADERM™ (estradiol), DELESTROGEN™ and VALERGEN™ (estradiol valerate), DEPO-ESTRADIOL CYPIONATE™ and ESTROJECT LA™ (estradiol cypionate); antiestrogens such as NOLVADEX™ (tamoxifen), SEROPHENE™ and CLOMID™ (clomiphene); progestins such as DURALUTIN™ (hydroxyprogesterone caproate), MPA™ and DEPO-PROVERA™ (medroxyprogesterone acetate), PROVERA™ and CYCRINT™ (MPA), MEGACE™ (megestrol acetate), NORLUTIN™ (norethindrone), and NORLUTATE™ and AYGESTIN™ (norethindrone acetate); progesterone implants such as NORPLANT SYSTEM™ (subdermal implants of norgestrel); antiprogestins such as RU 486™ (mifepristone); hormonal contraceptives such as ENOVID™ (norethynodrel plus mestranol), PROGESTASERT™ (intrauterine device that releases progesterone), LOESTRIN™, BREVICON™, MODICON™, GENORA™, NELONA™, NORINYL™, OVACON-35™ and OVACON-50™ (ethinyl estradiol/norethindrone), LEVLEN™, NORDETTE™, TRI-LEVLEN™ and TRIPHASIL-21™ (ethinyl estradiol/levonorgestrel) LO/OVRAL™ and OVRAL™ (ethinyl estradiol/norgestrel), DEMULEN™ (ethinyl estradiol/ethynodio/diacetate), NORINYL™, ORTHO-NOVUM™, NORETHIN™, GENORA™, and NELOVA™ (norethindrone/mestranol), DESOGEN™ and ORTHO-CEPT™ (ethinyl estradiol/desogestrel), ORTHO-CYCLEN™ and ORTHO-TRICYCLEN™ (ethinyl estradiol/norgestimate), MICRONOR™ and NOR-QD™ (norethindrone), and OVRETTE™ (norgestrel); testosterone esters such as methenolone acetate and testosterone undecanoate; parenteral and oral androgens such as TESTOJECT-50™ (testosterone), TESTEX™ (testosterone propionate), DELATESTRYLT™ (testosterone enanthate), DEPO-TESTOSTERONE™ (testosterone cypionate), DANOCRINE™ (danazol), HALOTESTIN™ (fluoxymestetone), ORETON METHYL™, TESTRED™ and VIRILON™ (methyltestosterone), and OXANDRIN™ (oxandrolone); testosterone transdermal systems such as TESTODERM™; androgen receptor antagonist and 5-alpha-reductase inhibitors such as ANDROCUR™ (cyproterone acetate), EULEXIN™ (flutamide), and PROSCAR™ (finasteride); adrenocorticotropic hormone preparations such as CORTROSYN™ (cosyntropin); adrenocortical steroids and their synthetic analogs such as ACLOVATE™ (alclometasone dipropionate), CYCLOCORT™ (amcinonide), BECLOVENT™ and VANCERIL™ (beclomethasone dipropionate), CELESTONE™ (betamethasone), BENISONE™ and UTICORT198 (betamethasone benzoate), DIPROSONE™ (betamethasone dipropionate), CELESTONE PHOSPHATE™ (betamethasone sodium phosphate), CELESTONE SOLUSPAN™ (betamethasone sodium phosphate and acetate), BETA-VAL™ and VALISONE™ (betamethasone valerate), TEMOVATE™ (clobetasol propionate), CLODERM™ (clocortolone pivalate), CORTEF™ and HYDROCORTONE™ (cortisol (hydrocortisone)), HYDROCORTONE ACETATE™ (cortisol (hydrocortisone) acetate), LOCOID™ (cortisol (hydrocortisone) butyrate), HYDROCORTONE PHOSPHATE™ (cortisol (hydrocortisone) sodium phosphate), A-HYDROCORT™ and SOLU CORTEF™ (cortisol (hydrocortisone) sodium succinate), WESTCORT™ (cortisol (hydrocortisone) valerate), CORTISONE ACETATE™ (cortisone acetate), DESOWEN™ and TRIDESILON™ (desonide), TOPICORT™ (desoximetasone), DECADRON™ (dexamethasone), DECADRON LA™ (dexamethasone acetate), DECADRON PHOSPHATE™ and HEXADROL PHOSPHATE™ (dexamethasone sodium phosphate), FLORONE™ and MAXIFLOR™ (diflorasone diacetate), FLORINEF ACETATE™ (fludrocortisone acetate), AEROBID™ and NASALIDE™ (flunisolide), FLUONID™ and SYNALAR™ (fluocinolone acetonide), LIDEX™ (fluocinonide), FLUOR-OP™ and FML™ (fluorometholone), CORDRAN™ (flurandrenolide), HALOG™ (halcinonide), HMS LIZUIFILM™ (medrysone), MEDROL™ (methylprednisolone), DEPO-MEDROL™ and MEDROL ACETATE™ (methylprednisone acetate), A-METHAPRED™ and SOLUMEDROL™ (methylprednisolone sodium succinate), ELOCON™ (mometasone furoate), HALDRONE™ (paramethasone acetate), DELTA-CORTEF™ (prednisolone), ECONOPRED™ (prednisolone acetate), HYDELTRASOL™ (prednisolone sodium phosphate), HYDELTRA-T.B.A™ (prednisolone tebutate), DELTASONE™ (prednisone), ARISTOCORT™ and KENACORT™ (triamcinolone), KENALOG™ (triamcinolone acetonide), ARISTOCORT™ and KENACORT DIACETATE™ (triamcinolone diacetate), and ARISTOSPAN™ (triamcinolone hexacetonide); inhibitors of biosynthesis and action of adrenocortical steroids such as CYTADREN™ (aminoglutethimide), NIZORAL™ (ketoconazole), MODRASTANE™ (trilostane), and METOPIRONE™ (metyrapone); bovine, porcine or human insulin or mixtures thereof; insulin analogs; recombinant human insulin such as HUMULIN™ and NOVOLIN™; oral hypoglycemic agents such as ORAMIDE™ and ORINASE™ (tolbutamide), DIABINESE™ (chlorpropamide), TOLAMIDE™ and TOLINASE™ (tolazamide), DYMELOR™ (acetohexamide), glibenclamide, MICRONASE™, DIBETA™ and GLYNASE™ (glyburide), GLUCOTROL™ (glipizide), and DIAMICRON™ (gliclazide), GLUCOPHAGE™ (metformin), ciglitazone, pioglitazone, and alpha-glucosidase inhibitors; bovine or porcine glucagon; somatostatins such as SANDOSTATIN™ (octreotide); and diazoxides such as PROGLYCEM™ (diazoxide).

[1047] In one embodiment, the Therapeutics of the invention are administered in combination with treatments for uterine motility disorders. Treatments for uterine motility disorders include, but are not limited to, estrogen drugs such as conjugated estrogens (e.g., PREMARIN® and ESTRATAB®), estradiols (e.g., CLIMARA® and ALORA®), estropipate, and chlorotrianisene; progestin drugs (e.g., AMEN® (medroxyprogesterone), MICRONOR® (norethidrone acetate), PROMETRIUM® progesterone, and megestrol acetate); and estrogen/progesterone combination therapies such as, for example, conjugated estrogens/medroxyprogesterone (e.g., PREMPRO™ and PREMPHASE®) and norethindrone acetate/ethinyl estsradiol (e.g., FEMHRT™).

[1048] In an additional embodiment, the Therapeutics of the invention are administered in combination with drugs effective in treating iron deficiency and hypochromic anemias, including but not limited to, ferrous sulfate (iron sulfate, FEOSOL™), ferrous fumarate (e.g., FEOSTAT™), ferrous gluconate (e.g., FERGON™), polysaccharide-iron complex (e.g., NIFEREX™), iron dextran injection (e.g., INFED™), cupric sulfate, pyroxidine, riboflavin, Vitamin B12, cyancobalamin injection (e.g., REDISOL™, RUBRAMIN PC™), hydroxocobalamin, folic acid (e.g., FOLVITE™), leucovorin (folinic acid, 5-CHOH4PteGlu, citrovorum factor) or WELLCOVORIN (Calcium salt of leucovorin), transferrin or ferritin.

[1049] In certain embodiments, the Therapeutics of the invention are administered in combination with agents used to treat psychiatric disorders. Psychiatric drugs that may be administered with the Therapeutics of the invention include, but are not limited to, antipsychotic agents (e.g., chlorpromazine, chlorprothixene, clozapine, fluphenazine, haloperidol, loxapine, mesoridazine, molindone, olanzapine, perphenazine, pimozide, quetiapine, risperidone, thioridazine, thiothixene, trifluoperazine, and triflupromazine), antimanic agents (e.g., carbamazepine, divalproex sodium, lithium carbonate, and lithium citrate), antidepressants (e.g., amitriptyline, amoxapine, bupropion, citalopram, clomipramine, desipramine, doxepin, fluvoxamine, fluoxetine, imipramine, isocarboxazid, maprotiline, mirtazapine, nefazodone, nortriptyline, paroxetine, phenelzine, protriptyline, sertraline, tranylcypromine, trazodone, trimipramine, and venlafaxine), antianxiety agents (e.g., alprazolam, buspirone, chlordiazepoxide, clorazepate, diazepam, halazepam, lorazepam, oxazepam, and prazepam), and stimulants (e.g., d-amphetamine, methylphenidate, and pemoline).

[1050] In other embodiments, the Therapeutics of the invention are administered in combination with agents used to treat neurological disorders. Neurological agents that may be administered with the Therapeutics of the invention include, but are not limited to, antiepileptic agents (e.g., carbamazepine, clonazepam, ethosuximide, phenobarbital, phenytoin, primidone, valproic acid, divalproex sodium, felbamate, gabapentin, lamotrigine, levetiracetam, oxcarbazepine, tiagabine, topiramate, zonisamide, diazepam, torazepam, and clonazepam), antiparkinsonian agents (e.g., levodopa/carbidopa, selegiline, amantidine, bromocriptine, pergolide, ropinirole, pramipexole, benztropine; biperiden; ethopropazine; procyclidine; trihexyphenidyl, tolcapone), and ALS therapeutics (e.g. riluzole).

[1051] In another embodiment, Therapeutics of the invention are administered in combination with vasodilating agents and/or calcium channel blocking agents. Vasodilating agents that may be administered with the Therapeutics of the invention include, but are not limited to, Angiotensin Converting Enzyme (ACE) inhibitors (e.g., papaverine, isoxsuprine, benazepril, captopril, cilazapril, enalapril, enalaprilat, fosinopril, lisinopril, moexipril, perindopril, quinapril, ramipril, spirapril, trandolapril, and nylidrin), and nitrates (e.g., isosorbide dinitrate, isosorbide mononitrate, and nitroglycerin). Examples of calcium channel blocking agents that may be administered in combination with the Therapeutics of the invention include, but are not limited to amlodipine, bepridil, diltiazem, felodipine, flunarizine, isradipine, nicardipine, nifedipine, nimodipine, and verapamil.

[1052] In additional embodiments, the Therapeutics of the invention are administered in combination with other therapeutic or prophylactic regimens, such as, for example, radiation therapy.

### Example 14

### Method of Treating Decreased Levels of the Potypeptide

[1053] The present invention relates to a method for treating an individual in need of an increased level of a polypeptide of the invention in the body comprising administering to such an individual a composition comprising a therapeutically effective amount of an agonist of the invention (including polypeptides of the invention). Moreover, it will be appreciated that conditions caused by a decrease in the standard or normal expression level of a polypeptide of the present invention in an individual can be treated by administering the agonist or antagonist of the present invention. Thus, the invention also provides a method of treatment of an individual in need of an increased level of the polypeptide comprising administering to such an individual a Therapeutic comprising an amount of the agonist or antagonist to increase the activity level of the polypeptide in such an individual.

[1054] For example, a patient with decreased levels of a polypeptide receives a daily dose 0.1-100 ug/kg of the agonist or antagonist for six consecutive days. The exact details of the dosing scheme, based on administration and formulation, are provided in Example 13.

### Example 15

### Method of Treating Increased Levels of the Polypeptide

[1055] The present invention also relates to a method of treating an individual in need of a decreased level of a polypeptide of the invention in the body comprising administering to such an individual a composition comprising a therapeutically effective amount of an antagonist of the invention (including polypeptides and antibodies of the invention).

[1056] In one example, antisense technology is used to inhibit production of a polypeptide of the present invention. This technology is one example of a method of decreasing levels of a polypeptide, due to a variety of etiologies, such as cancer.

[1057] For example, a patient diagnosed with abnormally increased levels of a polypeptide is administered intravenously antisense polynucleotides at 0.5, 1.0, 1.5, 2.0 and 3.0 mg/kg day for 21 days. This treatment is repeated after a 7-day rest period if the treatment was well tolerated. The formulation of the antisense polynucleotide is provided in Example 13.

### Example 16

### Method of Treatment Using Gene Therapy-ex Vivo

[1058] One method of gene therapy transplants fibroblasts, which are capable of expressing a polypeptide, onto a patient. Generally, fibroblasts are obtained from a subject by skin biopsy. The resulting tissue is placed in tissue-culture medium and separated into small pieces. Small chunks of the tissue are placed on a wet surface of a tissue culture flask, approximately ten pieces are placed in each flask. The flask is turned upside down, closed tight and left at room temperature over night. After 24 hours at room temperature, the flask is inverted and the chunks of tissue remain fixed to the bottom of the flask and fresh media (e.g., Ham's F12 media, with 10% FBS, penicillin and streptomycin) is added. The flasks are then incubated at 37 degree C for approximately one week.

[1059] At this time, fresh media is added and subsequently changed every several days. After an additional two weeks in culture, a monolayer of fibroblasts emerge. The monolayer is trypsinized and scaled into larger flasks.

[1060] pMV-7 (Kirschmeier, P.T. et al., DNA, 7:219-25 (1988)), flanked by the long terminal repeats of the Moloney murine sarcoma virus, is digested with EcoRI and HindIII and subsequently treated with calf intestinal phosphatase. The linear vector is fractionated on agarose gel and purified, using glass beads.

[1061] The cDNA encoding a polypeptide of the present invention can be amplified using PCR primers which correspond to the 5′ and 3′ end sequences respectively as set forth in Example 1 using primers and having appropriate restriction sites and initiation/stop codons, if necessary. Preferably, the 5′ primer contains an EcoRI site and the 3′ primer includes a HindIII site. Equal quantities of the Moloney murine sarcoma virus linear backbone and the amplified EcoRi and HindIll fragment are added together, in the presence of T4 DNA ligase. The resulting mixture is maintained under conditions appropriate for ligation of the two fragments. The ligation mixture is then used to transform bacteria HB101, which are then plated onto agar containing kanamycin for the purpose of confirming that the vector has the gene of interest properly inserted.

[1062] The amphotropic pA317 or GP+am12 packaging cells are grown in tissue culture to confluent density in Dulbecco's Modified Eagles Medium (DMEM) with 10% calf serum (CS), penicillin and streptomycin. The MSV vector containing the gene is then added to the media and the packaging cells transduced with the vector. The packaging cells now produce infectious viral particles containing the gene (the packaging cells are now referred to as producer cells).

[1063] Fresh media is added to the transduced producer cells, and subsequently, the media is harvested from a 10 cm plate of confluent producer cells. The spent media, containing the infectious viral particles, is filtered through a millipore filter to remove detached producer cells and this media is then used to infect fibroblast cells. Media is removed from a sub-confluent plate of fibroblasts and quickly replaced with the media from the producer cells. This media is removed and replaced with fresh media. If the titer of virus is high, then virtually all fibroblasts will be infected and no selection is required. If the titer is very low, then it is necessary to use a retroviral vector that has a selectable marker, such as neo or his. Once the fibroblasts have been efficiently infected, the fibroblasts are analyzed to determine whether protein is produced.

[1064] The engineered fibroblasts are then transplanted onto the host, either alone or after having been grown to confluence on cytodex 3 microcarrier beads.

### Example 17

### Gene Therapy Using Endogenous Genes Corresponding to Polynucleotides of the Invention

[1065] Another method of gene therapy according to the present invention involves operably associating the endogenous polynucleotide sequence of the invention with a promoter via homologous recombination as described, for example, in U.S. Pat. No. 5,641,670, issued Jun. 24, 1997; International Publication NO: WO 96/29411, published Sep. 26, 1996; International Publication NO: WO 94/12650, published Aug. 4, 1994; Koller et al., Proc. Natl. Acad. Sci. USA, 86:8932-8935 (1989); and Zijlstra et al., Nature, 342:435-438 (1989). This method involves the activation of a gene which is present in the target cells, but which is not expressed in the cells, or is expressed at a lower level than desired.

[1066] Polynucleotide constructs are made which contain a promoter and targeting sequences, which are homologous to the 5′ non-coding sequence of endogenous polynucleotide sequence, flanking the promoter. The targeting sequence will be sufficiently near the 5′ end of the polynucleotide sequence so the promoter will be operably linked to the endogenous sequence upon homologous recombination. The promoter and the targeting sequences can be amplified using PCR. Preferably, the amplified promoter contains distinct restriction enzyme sites on the 5′ and 3′ ends. Preferably, the 3′ end of the first targeting sequence contains the same restriction enzyme site as the 5′ end of the amplified promoter and the 5′ end of the second targeting sequence contains the same restriction site as the 3′ end of the amplified promoter.

[1067] The amplified promoter and the amplified targeting sequences are digested with the appropriate restriction enzymes and subsequently treated with calf intestinal phosphatase. The digested promoter and digested targeting sequences are added together in the presence of T4 DNA ligase. The resulting mixture is maintained under conditions appropriate for ligation of the two fragments. The construct is size fractionated on an agarose gel, then purified by phenol extraction and ethanol precipitation.

[1068] In this Example, the polynucleotide constructs are administered as naked polynucleotides via electroporation. However, the polynucleotide constructs may also be administered with transfection-facilitating agents, such as liposomes, viral sequences, viral particles, precipitating agents, etc. Such methods of delivery are known in the art.

[1069] Once the cells are transfected, homologous recombination will take place which results in the promoter being operably linked to the endogenous polynucleotide sequence. This results in the expression of polynucleotide corresponding to the polynucleotide in the cell. Expression may be detected by immunological staining, or any other method known in the art.

[1070] Fibroblasts are obtained from a subject by skin biopsy. The resulting tissue is placed in DMEM+10% fetal calf serum. Exponentially growing or early stationary phase fibroblasts are trypsinized and rinsed from the plastic surface with nutrient medium. An aliquot of the cell suspension is removed for counting, and the remaining cells are subjected to centrifugation. The supernatant is aspirated and the pellet is resuspended in 5 ml of electroporation buffer (20 mM HEPES pH 7.3, 137 mM NaCl, 5 mM KCl, 0.7 mM Na₂ HPO₄, 6 mM dextrose). The cells are recentrifuged, the supernatant aspirated, and the cells resuspended in electroporation buffer containing 1 mg/ml acetylated bovine serum albumin. The final cell suspension contains approximately 3×10⁶ cells/ml. Electroporation should be performed immediately following resuspension.

[1071] Plasmid DNA.is prepared according to standard techniques. For example, to construct a plasmid for targeting to the locus corresponding to the polynucleotide of the invention, plasmid pUC18 (MBI Fermentas, Amherst, N.Y.) is digested with HindIII. The CMV promoter is amplified by PCR with an XbaI site on the 5′ end and a BamHI site on the 3′ end. Two non-coding sequences are amplified via PCR: one non-coding sequence (fragment 1) is amplified with a HindIII site at the 5′ end and an Xba site at the 3′end; the other non-coding sequence (fragment 2) is amplified with a BamHI site at the 5′end and a HindIII site at the 3′end. The CMV promoter and the fragments (1 and 2) are digested with the appropriate enzymes (CMV promoter—XbaI and BamHI; fragment 1—XbaI; fragment 2—BamHI) and ligated together. The resulting ligation product is digested with HindIII, and ligated with the HindIII-digested pUC18 plasmid.

[1072] Plasmid DNA is added to a sterile cuvette with a 0.4 cm electrode gap (Bio-Rad). The final DNA concentration is generally at least 120 μg/ml. 0.5 ml of the cell suspension (containing approximately 1.5×10⁶ cells) is then added to the cuvette, and the cell suspension and DNA solutions are gently mixed. Electroporation is performed with a Gene-Pulser apparatus (Bio-Rad). Capacitance and voltage are set at 960 μF and 250-300 V, respectively. As voltage increases, cell survival decreases, but the percentage of surviving cells that stably incorporate the introduced DNA into their genome increases dramatically. Given these parameters, a pulse time of approximately 14-20 mSec should be observed.

[1073] Electroporated cells are maintained at room temperature for approximately 5 min, and the contents of the cuvette are then gently removed with a sterile transfer pipette. The cells are added directly to 10 ml of prewarmed nutrient media (DMEM with 15% calf serum) in a 10 cm dish and incubated at 37 degree C. The following day, the media is aspirated and replaced with 10 ml of fresh media and incubated for a further 16-24 hours.

[1074] The engineered fibroblasts are then injected into the host, either alone or after having been grown to confluence on cytodex 3 microcarrier beads. The fibroblasts now produce the protein product. The fibroblasts can then be introduced into a patient as described above.

### Example 18

### Method of Treatment Using Gene Therapy—in vivo

[1075] Another aspect of the present invention is using in vivo gene therapy methods to treat disorders, diseases and conditions. The gene therapy method relates to the introduction of naked nucleic acid (DNA, RNA, and antisense DNA or RNA) sequences into an animal to increase or decrease the expression of the polypeptide. The polynucleotide of the present invention may be operatively linked to (i.e., associated with) a promoter or any other genetic elements necessary for the expression of the polypeptide by the target tissue. Such gene therapy and delivery techniques and methods are known in the art, see, for example, WO90/11092, WO98/11779; U.S. Pat. Nos. 5,693,622, 5,705,151, 5,580,859; Tabata et al., Cardiovasc. Res. 35(3):470-479 (1997); Chao et al., Pharmacol. Res. 35(6):517-522 (1997); Wolff, Neuromuscul. Disord. 7(5):314-318 (1997); Schwartz et al., Gene Ther. 3(5):405-411 (1996); Tsurumi et al., Circulation 94(12):3281-3290 (1996) (incorporated herein by reference).

[1076] The polynucleotide constructs may be delivered by any method that delivers injectable materials to the cells of an animal, such as, injection into the interstitial space of tissues (heart, muscle, skin, lung, liver, intestine and the like). The polynucleotide constructs can be delivered in a pharmaceutically acceptable liquid or aqueous carrier.

[1077] The term “naked” polynucleotide, DNA or RNA, refers to sequences that are free from any delivery vehicle that acts to assist, promote, or facilitate entry into the cell, including viral sequences, viral particles, liposome formulations, lipofectin or precipitating agents and the like. However, the polynucleotides of the present invention may also be delivered in liposome formulations (such as those taught in Feigner P.L. et al. (1995) Ann. NY Acad. Sci. 772:126-139 and Abdallah B. et al. (1995) Biol. Cell 85(1):1-7) which can be prepared by methods well known to those skilled in the art.

[1078] The polynucleotide vector constructs used in the gene therapy method are preferably constructs that will not integrate into the host genome nor will they contain sequences that allow for replication. Any strong promoter known to those skilled in the art can be used for driving the expression of DNA. Unlike other gene therapy techniques, one major advantage of introducing naked nucleic acid sequences into target cells is the transitory nature of the polynucleotide synthesis in the cells. Studies have shown that non-replicating DNA sequences can be introduced into cells to provide production of the desired polypeptide for periods of up to six months.

[1079] The polynucleotide construct can be delivered to the interstitial space of tissues within an animal, including muscle, skin, brain, lung, liver, spleen, bone marrow, thymus, heart, lymph, blood, bone, cartilage, pancreas, kidney, gall bladder, stomach, intestine, testis, ovary, uterus, rectum, nervous system, eye, gland, and connective tissue. Interstitial space of the tissues comprises the intercellular fluid, mucopolysaccharide matrix among the reticular fibers of organ tissues, elastic fibers in the walls of vessels or chambers, collagen fibers of fibrous tissues, or that same matrix within connective tissue ensheathing muscle cells or in the lacunae of bone. It is similarly the space occupied by the plasma of the circulation and the lymph fluid of the lymphatic channels. Delivery to the interstitial space of muscle tissue is preferred for the reasons discussed below. They may be conveniently delivered by injection into the tissues comprising these cells. They are preferably delivered to and expressed in persistent, non-dividing cells which are differentiated, although delivery and expression may be achieved in non-differentiated or less completely differentiated cells, such as, for example, stem cells of blood or skin fibroblasts. In vivo muscle cells are particularly competent in their ability to take up and express polynucleotides.

[1080] For the naked polynucleotide injection, an effective dosage amount of DNA or RNA will be in the range of from about 0.05 g/kg body weight to about 50 mg/kg body weight. Preferably the dosage will be from about 0.005 mg/kg to about 20 mg/kg and more preferably from about 0.05 mg/kg to about 5 mg/kg. Of course, as the artisan of ordinary skill will appreciate, this dosage will vary according to the tissue site of injection. The appropriate and effective dosage of nucleic acid sequence can readily be determined by those of ordinary skill in the art and may depend on the condition being treated and the route of administration. The preferred route of administration is by the parenteral route of injection into the interstitial space of tissues. However, other parenteral routes may also be used, such as, inhalation of an aerosol formulation particularly for delivery to lungs or bronchial tissues, throat or mucous membranes of the nose. In addition, naked polynucleotide constructs can be delivered to arteries during angioplasty by the catheter used in the procedure.

[1081] The dose response effects of injected polynucleotide in muscle in vivo is determined as follows. Suitable template DNA for production of mRNA coding for polypeptide of the present invention is prepared in accordance with a standard recombinant DNA methodology. The template DNA, which may be either circular or linear, is either used as naked DNA or complexed with liposomes. The quadriceps muscles of mice are then injected with various amounts of the template DNA.

[1082] Five to six week old female and male Balb/C mice are anesthetized by intraperitoneal injection with 0.3 ml of 2.5% Avertin. A 1.5 cm incision is made on the anterior thigh, and the quadriceps muscle is directly visualized. The template DNA is injected in 0.1 ml of carrier in a 1 cc syringe through a 27 gauge needle over one minute, approximately 0.5 cm from the distal insertion site of the muscle into the knee and about 0.2 cm deep. A suture is placed over the injection site for future localization, and the skin is closed with stainless steel clips.

[1083] After an appropriate incubation time (e.g., 7 days) muscle extracts are prepared by excising the entire quadriceps. Every fifth 15 um cross-section of the individual quadriceps muscles is histochemically stained for protein expression. A time course for protein expression may be done in a similar fashion except that quadriceps from different mice are harvested at different times. Persistence of DNA in muscle following injection may be determined by Southern blot analysis after preparing total cellular DNA and HIRT supernatants from injected and control mice. The results of the above experimentation in mice can be used to extrapolate proper dosages and other treatment parameters in humans and other animals using naked DNA.

### Example 19

### Transgenic Animals

[1084] The polypeptides of the invention can also be expressed in transgenic animals. Animals of any species, including, but not limited to, mice, rats, rabbits, hamsters, guinea pigs, pigs, micro-pigs, goats, sheep, cows and non-human primates, e.g., baboons, monkeys, and chimpanzees may be used to generate transgenic animals. In a specific embodiment, techniques described herein or otherwise known in the art, are used to express polypeptides of the invention in humans, as part of a gene therapy protocol.

[1085] Any technique known in the art may be used to introduce the transgene (i.e., polynucleotides of the invention) into animals to produce the founder lines of transgenic animals. Such techniques include, but are not limited to, pronuclear microinjection (Paterson et al., Appl. Microbiol. Biotechnol. 40:691-698 (1994); Carver et al., Biotechnology (NY) 11:1263-1270 (1993); Wright et al., Biotechnology (NY) 9:830-834 (1991); and Hoppe et al., U.S. Pat. No. 4,873,191 (1989)); retrovirus mediated gene transfer into germ lines (Van der Putten et al., Proc. Natl. Acad. Sci., USA 82:6148-6152 (1985)), blastocysts or embryos; gene targeting in embryonic stem cells (Thompson et al., Cell 56:313-321 (1989)); electroporation of cells or embryos (Lo, 1983, Mol Cell. Biol. 3:1803-1814 (1983)); introduction of the polynucleotides of the invention using a gene gun (see, e.g., Ulmer et al., Science 259:1745 (1993); introducing nucleic acid constructs into embryonic pleuripotent stem cells and transferring the stem cells back into the blastocyst; and sperm-mediated gene transfer (Lavitrano et al., Cell 57:717-723 (1989); etc. For a review of such techniques, see Gordon, “Transgenic Animals,” Intl. Rev. Cytol. 115:171-229 (1989), which is incorporated by reference herein in its entirety.

[1086] Any technique known in the art may be used to produce transgenic clones containing polynucleotides of the invention, for example, nuclear transfer into enucleated oocytes of nuclei from cultured embryonic, fetal, or adult cells induced to quiescence (Campell et al., Nature 380:64-66 (1996); Wilmut et al., Nature 385:810-813 (1997)).

[1087] The present invention provides for transgenic animals that carry the transgene in all their cells, as well as animals which carry the transgene in some, but not all their cells, i.e., mosaic animals or chimeric. The transgene may be integrated as a single transgene or as multiple copies such as in concatamers, e.g. head-to-head tandems or head-to-tail tandems. The transgene may also be selectively introduced into and activated in a particular cell type by following, for example, the teaching of Lasko et al. (Lasko et al., Proc. Natl. Acad. Sci. USA 89:6232-6236 (1992)). The regulatory sequences required for such a cell-type specific activation will depend upon the particular cell type of interest, and will be apparent to those of skill in the art. When it is desired that the polynucleotide transgene be integrated into the chromosomal site of the endogenous gene, gene targeting is preferred. Briefly, when such a technique is to be utilized, vectors containing some nucleotide sequences homologous to the endogenous gene are designed for the purpose of integrating, via homologous recombination with chromosomal sequences, into and disrupting the function of the nucleotide sequence of the endogenous gene. The transgene may also be selectively introduced into a particular cell type, thus inactivating the endogenous gene in only that cell type, by following, for example, the teaching of Gu et al. (Gu et al., Science 265:103-106 (1994)). The regulatory sequences required for such a cell-type specific inactivation will depend upon the particular cell type of interest, and will be apparent to those of skill in the art.

[1088] Once transgenic animals have been generated, the expression of the recombinant gene may be assayed utilizing standard techniques. Initial screening may be accomplished by Southern blot analysis or PCR techniques to analyze animal tissues to verify that integration of the transgene has taken place. The level of mRNA expression of the transgene in the tissues of the transgenic animals may also be assessed using techniques which include, but are not limited to, Northern blot analysis of tissue samples obtained from the animal, in situ hybridization analysis, and reverse transcriptase-PCR (rt-PCR). Samples of transgenic gene-expressing tissue may also be evaluated immunocytochemically or immunohistochemically using antibodies specific for the transgene product.

[1089] Once the founder animals are produced, they may be bred, inbred, outbred, or crossbred to produce colonies of the particular animal. Examples of such breeding strategies include, but are not limited to: outbreeding of founder animals with more than one integration site in order to establish separate lines; inbreeding of separate lines in order to produce compound transgenics that express the transgene at higher levels because of the effects of additive expression of each transgene; crossing of heterozygous transgenic animals to produce animals homozygous for a given integration site in order to both augment expression and eliminate the need for screening of animals by DNA analysis; crossing of separate homozygous lines to produce compound heterozygous or homozygous lines; and breeding to place the transgene on a distinct background that is appropriate for an experimental model of interest.

[1090] Transgenic animals of the invention have uses which include, but are not limited to, animal model systems useful in elaborating the biological function of polypeptides of the present invention, studying conditions and/or disorders associated with aberrant expression, and in screening for compounds effective in ameliorating such conditions and/or disorders.

### Example 20

### Knock-out Animals

[1091] Endogenous gene expression can also be reduced by inactivating or “knocking out” the gene and/or its promoter using targeted homologous recombination. (See e.g., Smithies et al., Nature 317:230-234 (1985); Thomas & Capecchi, Cell 51:503-512 (1987); Thompson et al., Cell 5:313-321 (1989); each of which is incorporated by reference herein in its entirety.) For example, a mutant, non-functional polynucleotide of the invention (or a completely unrelated DNA sequence) flanked by DNA homologous to the endogenous polynucleotide sequence (either the coding regions or regulatory regions of the gene) can be used, with or without a selectable marker and/or a negative selectable marker, to transfect cells that express polypeptides of the invention in vivo. In another embodiment, techniques known in the art are used to generate knockouts in cells that contain, but do not express the gene of interest. Insertion of the DNA construct, via targeted homologous recombination, results in inactivation of the targeted gene. Such approaches are particularly suited in research and agricultural fields where modifications to embryonic stem cells can be used to generate animal offspring with an inactive targeted gene (e.g,., see Thomas & Capecchi 1987 and Thompson 1989, supra). However this approach can be routinely adapted for use in humans provided the recombinant DNA constructs are directly administered or targeted to the required site in vivo using appropriate viral vectors that will be apparent to those of skill in the art.

[1092] In further embodiments of the invention, cells that are genetically engineered to express the polypeptides of the invention, or alternatively, that are genetically engineered not to express the polypeptides of the invention (e.g., knockouts) are administered to a patient in vivo. Such cells may be obtained from the patient (i.e., animal, including human) or an MHC compatible donor and can include, but are not limited to fibroblasts, bone marrow cells, blood cells (e.g., lymphocytes), adipocytes, muscle cells, endothelial cells etc. The cells are genetically engineered in vitro using recombinant DNA techniques to introduce the coding sequence of polypeptides of the invention into the cells, or alternatively, to disrupt the coding sequence and/or endogenous regulatory sequence associated with the polypeptides of the invention, e.g., by transduction (using viral vectors, and preferably vectors that integrate the transgene into the cell genome) or transfection procedures, including, but not limited to, the use of plasmids, cosmids, YACs, naked DNA, electroporation, liposomes, etc. The coding sequence of the polypeptides of the invention can be placed under the control of a strong constitutive or inducible promoter or promoter/enhancer to achieve expression, and preferably secretion, of the polypeptides of the invention. The engineered cells which express and preferably secrete the polypeptides of the invention can be introduced into the patient systemically, e.g., in the circulation, or intraperitoneally.

[1093] Alternatively, the cells can be incorporated into a matrix and implanted in the body, e.g., genetically engineered fibroblasts can be implanted as part of a skin graft; genetically engineered endothelial cells can be implanted as part of a lymphatic or vascular graft. (See, for example, Anderson et al. U.S. Pat. No. 5,399,349; and Mulligan & Wilson, U.S. Pat. No. 5,460,959 each of which is incorporated by reference herein in its entirety).

[1094] When the cells to be administered are non-autologous or non-MHC compatible cells, they can be administered using well known techniques which prevent the development of a host immune response against the introduced cells. For example, the cells may be introduced in an encapsulated form which, while allowing for an exchange of components with the immediate extracellular environment, does not allow the introduced cells to be recognized by the host immune system.

[1095] Transgenic and “knock-out” animals of the invention have uses which include, but are not limited to, animal model systems useful in elaborating the biological function of polypeptides of the present invention, studying conditions and/or disorders associated with aberrant expression, and in screening for compounds effective in ameliorating such conditions and/or disorders.

### Example 21

### Assays Detecting Stimulation or Inhibition of B Cell Proliferation and Differentiation

[1096] Generation of functional humoral immune responses requires both soluble and cognate signaling between B-lineage cells and their microenvironment. Signals may impart a positive stimulus that allows a B-lineage cell to continue its programmed development, or a negative stimulus that instructs the cell to arrest its current developmental pathway. To date, numerous stimulatory and inhibitory signals have been found to influence B cell responsiveness including IL-2, IL-4, IL-5, IL-6, IL-7, IL10, IL-13, IL-14 and IL-15. Interestingly, these signals are by themselves weak effectors but can, in combination with various co-stimulatory proteins, induce activation, proliferation, differentiation, homing, tolerance and death among B cell populations.

[1097] One of the best studied classes of B-cell co-stimulatory proteins is the TNF-superfamily. Within this family CD40, CD27, and CD30 along with their respective ligands CD154, CD70, and CD153 have been found to regulate a variety of immune responses. Assays which allow for the detection and/or observation of the proliferation and differentiation of these B-cell populations and their precursors are valuable tools in determining the effects various proteins may have on these B-cell populations in terms of proliferation and differentiation. Listed below are two assays designed to allow for the detection of the differentiation, proliferation, or inhibition of B-cell populations and their precursors.

[1098] In vitro Assay—Agonists or antagonists of the invention can be assessed for its ability to induce activation, proliferation, differentiation or inhibition and/or death in B-cell populations and their precursors. The activity of the agonists or antagonists of the invention on purified human tonsillar B cells, measured qualitatively over the dose range from 0.1 to 10,000 ng/mL, is assessed in a standard B-lymphocyte co-stimulation assay in which purified tonsillar B cells are cultured in the presence of either formalin-fixed Staphylococcus aureus Cowan I (SAC) or immobilized anti-human IgM antibody as the priming agent. Second signals such as IL-2 and IL-15 synergize with SAC and IgM crosslinking to elicit B cell proliferation as measured by tritiated-thymidine incorporation. Novel synergizing agents can be readily identified using this assay. The assay involves isolating human tonsillar B cells by magnetic bead (MACS) depletion of CD3-positive cells. The resulting cell population is greater than 95% B cells as assessed by expression of CD45R(B220).

[1099] Various dilutions of each sample are placed into individual wells of a 96-well plate to which are added 10⁵ B-cells suspended in culture medium (RPMI 1640 containing 10% FBS, 5×10⁻⁵M 2 ME, 100 U/ml penicillin, 10 ug/ml streptomycin, and 10⁻⁵ dilution of SAC) in a total volume of 150 ul. Proliferation or inhibition is quantitated by a 20 h pulse (luCi/well) with 3H-thymidine (6.7 Ci/mM) beginning 72 h post factor addition. The positive and negative controls are IL2 and medium respectively.

[1100] In vivo Assay—BALB/c mice are injected (i.p.) twice per day with buffer only, or 2 mg/Kg of agonists or antagonists of the invention, or truncated forms thereof. Mice receive this treatment for 4 consecutive days, at which time they are sacrificed and various tissues and serum collected for analyses. Comparison of H&E sections from normal spleens and spleens treated with agonists or antagonists of the invention identify the results of the activity of the agonists or antagonists on spleen cells, such as the diffusion of peri-arterial lymphatic sheaths, and/or significant increases in the nucleated cellularity of the red pulp regions, which may indicate the activation of the differentiation and proliferation of B-cell populations. Immunohistochemical studies using a B cell marker, anti-CD45R(B220), are used to determine whether any physiological changes to splenic cells, such as splenic disorganization, are due to increased B-cell representation within loosely defined B-cell zones that infiltrate established T-cell regions.

[1101] Flow cytometric analyses of the spleens from mice treated with agonist or antagonist is used to indicate whether the agonists or antagonists specifically increases the proportion of ThB+, CD45R(B220)dull B cells over that which is observed in control mice.

[1102] Likewise, a predicted consequence of increased mature B-cell representation in vivo is a relative increase in serum Ig titers. Accordingly, serum IgM and IgA levels are compared between buffer and agonists or antagonists-treated mice.

[1103] The studies described in this example tested activity of agonists or antagonists of the invention. However, one skilled in the art could easily modify the exemplified studies to test the activity of polynucleotides or polypeptides of the invention (e.g., gene therapy).

### Example 22

### T Cell Proliferation Assay

[1104] A CD3-induced proliferation assay is performed on PBMCs and is measured by the uptake of ³H-thymidine. The assay is performed as follows. Ninety-six well plates are coated with 100 μl/well of mAb to CD3 (HIT3a, Pharmingen) or isotype-matched control mAb (B33.1) overnight at 4 degrees C (1 μg/ml in 0.05M bicarbonate buffer, pH 9.5), then washed three times with PBS. PBMC are isolated by F/H gradient centrifugation from human peripheral blood and added to quadruplicate wells (5×10⁴/well) of mAb coated plates in RPMI containing 10% FCS and P/S in the presence of varying concentrations of agonists or antagonists of the invention (total volume 200 ul). Relevant protein buffer and medium alone are controls. After 48 hr. culture at 37 degrees C, plates are spun for 2 min. at 1000 rpm and 100 μl of supernatant is removed and stored −20 degrees C for measurement of IL-2 (or other cytokines) if effect on proliferation is observed. Wells are supplemented with 100 ul of medium containing 0.5 uCi of ³H-thymidine and cultured at 37 degrees C for 18-24 hr. Wells are harvested and incorporation of ³H-thymidine used as a measure of proliferation. Anti-CD3 alone is the positive control for proliferation. IL-2 (100 U/ml) is also used as a control which enhances proliferation. Control antibody which does not induce proliferation of T cells is used as the negative control for the effects of agonists or antagonists of the invention.

[1105] The studies described in this example tested activity of agonists or antagonists of the invention. However, one skilled in the art could easily modify the exemplified studies to test the activity of polynucleotides or polypeptides of the invention (e.g., gene therapy).

### Example 23

### Effect of Agonists or Antagonists of the Invention on the Expression of MHC Class II, Costimulatory and Adhesion Molecules and Cell Differentiation of Monocytes and Mon Ocyte-derived Human Dendritic Cells

[1106] Dendritic cells are generated by the expansion of proliferating precursors found in the peripheral blood: adherent PBMC or elutriated monocytic fractions are cultured for 7-10 days with GM-CSF (50 ng/ml) and IL-4 (20 ng/ml). These dendritic cells have the characteristic phenotype of immature cells (expression of CD1, CD80, CD86, CD40 and MHC class II antigens). Treatment with activating factors, such as TNF-α, causes a rapid change in surface phenotype (increased expression of MHC class I and U, costimulatory and adhesion molecules, downregulation of FCγRII, upregulation of CD83). These changes correlate with increased antigen-presenting capacity and with functional maturation of the dendritic cells.

[1107] FACS analysis of surface antigens is performed as follows. Cells are treated 1-3 days with increasing concentrations of agonist or antagonist of the invention or LPS (positive control), washed with PBS containing 1% BSA and 0.02 mM sodium azide, and then incubated with 1:20 dilution of appropriate FITC- or PE-labeled monoclonal antibodies for 30 minutes at 4 degrees C. After an additional wash, the labeled cells are analyzed by flow cytometry on a FACScan (Becton Dickinson).

[1108] Effect on the Production of Cytokines.

[1109] Cytokines generated by dendritic cells, in particular IL-12, are important in the initiation of T-cell dependent immune responses. IL-12 strongly influences the development of Thi helper T-cell immune response, and induces cytotoxic T and NK cell function. An ELISA is used to measure the IL-12 release as follows. Dendritic cells (10⁶/ml) are treated with increasing concentrations of agonists or antagonists of the invention for 24 hours. LPS (100 ng/ml) is added to the cell culture as positive control. Supernatants from the cell cultures are then collected and analyzed for IL-12 content using commercial ELISA kit (e.g., R & D Systems (Minneapolis, Minn.)). The standard protocols provided with the kits are used.

[1110] Effect on the Expression of MHC Class II, Costimulatory and Adhesion Molecules.

[1111] Three major families of cell surface antigens can be identified on monocytes: adhesion molecules, molecules involved in antigen presentation, and Fc receptor. Modulation of the expression of MHC class II antigens and other costimulatory molecules, such as B7 and ICAM-1, may result in changes in the antigen presenting capacity of monocytes and ability to induce T cell activation. Increased expression of Fc receptors may correlate with improved monocyte cytotoxic activity, cytokine release and phagocytosis.

[1112] FACS analysis is used to examine the surface antigens as follows. Monocytes are treated 1-5 days with increasing concentrations of agonists or antagonists of the invention or LPS (positive control), washed with PBS containing 1% BSA and 0.02 mM sodium azide, and then incubated with 1:20 dilution of appropriate FITC- or PE-labeled monoclonal antibodies for 30 minutes at 4 degrees C. After an additional wash, the labeled cells are analyzed by flow cytometry on a FACScan (Becton Dickinson).

[1113] Monocyte Activation and/or Increased Survival.

[1114] Assays for molecules that activate (or alternatively, inactivate) monocytes and/or increase monocyte survival (or alternatively, decrease monocyte survival) are known in the art and may routinely be applied to determine whether a molecule of the invention functions as an inhibitor or activator of monocytes. Agonists or antagonists of the invention can be screened using the three assays described below. For each of these assays, Peripheral blood mononuclear cells (PBMC) are purified from single donor leukopacks (American Red Cross, Baltimore, Md.) by centrifugation through a Histopaque gradient (Sigma). Monocytes are isolated from PBMC by counterflow centrifugal elutriation.

[1115] Monocyte Survival Assay.

[1116] Human peripheral blood monocytes progressively lose viability when cultured in absence of serum or other stimuli. Their death results from internally regulated processes (apoptosis). Addition to the culture of activating factors, such as TNF-alpha dramatically improves cell survival and prevents DNA fragmentation. Propidium iodide (PI) staining is used to measure apoptosis as follows. Monocytes are cultured for 48 hours in polypropylene tubes in serum-free medium (positive control), in the presence of 100 ng/ml TNF-alpha (negative control), and in the presence of varying concentrations of the compound to be tested. Cells are suspended at a concentration of 2×10⁶/ml in PBS containing PI at a final concentration of 5 μg/ml, and then incubated at room temperature for 5 minutes before FACScan analysis. PI uptake has been demonstrated to correlate with DNA fragmentation in this experimental paradigm.

[1117] Effect on Cytokine Release.

[1118] An important function of monocytes/macrophages is their regulatory activity on other cellular populations of the immune system through the release of cytokines after stimulation. An ELISA to measure cytokine release is performed as follows. Human monocytes are incubated at a density of 5×10⁵ cells/ml with increasing concentrations of agonists or antagonists of the invention and under the same conditions, but in the absence of agonists or antagonists. For IL-12 production, the cells are primed overnight with IFN (100 U/ml) in the presence of agonist or antagonist of the invention. LPS (10 ng/ml) is then added. Conditioned media are collected after 24 h and kept frozen until use. Measurement of TNF-alpha, IL-10, MCP-1 and IL-8 is then performed using a commercially available ELISA kit (e.g., R & D Systems (Minneapolis, Minn.)) and applying the standard protocols provided with the kit.

[1119] Oxidative Burst.

[1120] Purified monocytes are plated in 96-w plate at 2-1×10⁵ cell/well. Increasing concentrations of agonists or antagonists of the invention are added to the wells in a total volume of 0.2 ml culture medium (RPMI 1640+10% FCS, glutamine and antibiotics). After 3 days incubation, the plates are centrifuged and the medium is removed from the wells. To the macrophage monolayers, 0.2 ml per well of phenol red solution (140 mM NaCl, 10 mM potassium phosphate buffer pH 7.0, 5.5 mM dextrose, 0.56 mM phenol red and 19 U/ml of HRPO) is added, together with the stimulant (200 nM PMA). The plates are incubated at 37° C. for 2 hours and the reaction is stopped by adding 20 μl IN NaOH per well. The absorbance is read at 610 nm. To calculate the amount of H₂O₂ produced by the macrophages, a standard curve of a H₂O₂ solution of known molarity is performed for each experiment.

[1121] The studies described in this example tested activity of agonists or antagonists of the invention. However, one skilled in the art could easily modify the exemplified studies to test the activity of polynucleotides or polypeptides of the invention (e.g., gene therapy).

### Example 24

### Biological Effects of Agonists or Antagonists of the Invention Astrocyte and Neuronal Assay

[1122] Agonists or antagonists of the invention, expressed in Escherichia coli and purified as described above, can be tested for activity in promoting the survival, neurite outgrowth, or phenotypic differentiation of cortical neuronal cells and for inducing the proliferation of glial fibrillary acidic protein immunopositive cells, astrocytes. The selection of cortical cells for the bioassay is based on the prevalent expression of FGF-1 and FGF-2 in cortical structures and on the previously reported enhancement of cortical neuronal survival resulting from FGF-2 treatment. A thymidine incorporation assay, for example, can be used to elucidate an agonist or antagonist of the invention's activity on these cells.

[1123] Moreover, previous reports describing the biological effects of FGF-2 (basic FGF) on cortical or hippocampal neurons in vitro have demonstrated increases in both neuron survival and neurite outgrowth (Walicke et al., “Fibroblast growth factor promotes survival of dissociated hippocampal neurons and enhances neurite extension.” Proc. Natl. Acad. Sci. USA 83:3012-3016. (1986), assay herein incorporated by reference in its entirety). However, reports from experiments done on PC-12 cells suggest that these two responses are not necessarily synonymous and may depend on not only which FGF is being tested but also on which receptor(s) are expressed on the target cells. Using the primary cortical neuronal culture paradigm, the ability of an agonist or antagonist of the invention to induce neurite outgrowth can be compared to the response achieved with FGF-2 using, for example, a thymidine incorporation assay.

[1124] Fibroblast and Endothelial Cell Assays

[1125] Human lung fibroblasts are obtained from Clonetics (San Diego, Calif.) and maintained in growth media from Clonetics. Dermal microvascular endothelial cells are obtained from Cell Applications (San Diego, Calif.). For proliferation assays, the human lung fibroblasts and dermal microvascular endothelial cells can be cultured at 5,000 cells/well in a 96-well plate for one day in growth medium. The cells are then incubated for one day in 0.1% BSA basal medium. After replacing the medium with fresh 0.1% BSA medium, the cells are incubated with the test proteins for 3 days. Alamar Blue (Alamar Biosciences, Sacramento, Calif.) is added to each well to a final concentration of 10%. The cells are incubated for 4 hr. Cell viability is measured by reading in a CytoFluor fluorescence reader. For the PGE₂ assays, the human lung fibroblasts are cultured at 5,000 cells/well in a 96-well plate for one day. After a medium change to 0.1% BSA basal medium, the cells are incubated with FGF-2 or agonists or antagonists of the invention with or without IL-1α for 24 hours. The supernatants are collected and assayed for PGE₂ by EIA kit (Cayman, Ann Arbor, Mich.). For the IL-6 assays, the human lung fibroblasts are cultured at 5,000 cells/well in a 96-well plate for one day. After a medium change to 0.1% BSA basal medium, the cells are incubated with FGF-2 or with or without agonists or antagonists of the invention IL-1α for 24 hours. The supernatants are collected and assayed for IL-6 by ELISA kit (Endogen, Cambridge, Mass.).

[1126] Human lung fibroblasts are cultured with FGF-2 or agonists or antagonists of the invention for 3 days in basal medium before the addition of Alamar Blue to assess effects on growth of the fibroblasts. FGF-2 should show a stimulation at 10-2500 ng/ml which can be used to compare stimulation with agonists or antagonists of the invention.

[1127] Parkinson Models.

[1128] The loss of motor function in Parkinson's disease is attributed to a deficiency of striatal dopamine resulting from the degeneration of the nigrostriatal dopaminergic projection neurons. An animal model for Parkinson's that has been extensively characterized involves the systemic administration of 1-methyl-4 phenyl 1,2,3,6-tetrahydropyridine (MPTP). In the CNS, MPTP is taken-up by astrocytes and catabolized by monoamine oxidase B to 1-methyl-4-phenyl pyridine (MPP⁺) and released. Subsequently, MPP⁺ is actively accumulated in dopaminergic neurons by the high-affinity reuptake transporter for dopamine. MPP⁺ is then concentrated in mitochondria by the electrochemical gradient and selectively inhibits nicotidamide adenine disphosphate: ubiquinone oxidoreductionase (complex I), thereby interfering with electron transport and eventually generating oxygen radicals.

[1129] It has been demonstrated in tissue culture paradigms that FGF-2 (basic FGF) has trophic activity towards nigral dopaminergic neurons (Ferrari et al., Dev. Biol. 1989). Recently, Dr. Unsicker's group has demonstrated that administering FGF-2 in gel foam implants in the striatum results in the near complete protection of nigral dopaminergic neurons from the toxicity associated with MPTP exposure (Otto and Unsicker, J. Neuroscience, 1990).

[1130] Based on the data with FGF-2, agonists or antagonists of the invention can be evaluated to determine whether it has an action similar to that of FGF-2 in enhancing dopaminergic neuronal survival in vitro and it can also be tested in vivo for protection of dopaminergic neurons in the striatum from the damage associated with MPTP treatment. The potential effect of an agonist or antagonist of the invention is first examined in vitro in a dopaminergic neuronal cell culture paradigm. The cultures are prepared by dissecting the midbrain floor plate from gestation day 14 Wistar rat embryos. The tissue is dissociated with trypsin and seeded at a density of 200,000 cells/cm² on polyorthinine-laminin coated glass coverslips. The cells are maintained in Dulbecco's Modified Eagle's medium and F12 medium containing hormonal supplements (Ni). The cultures are fixed with paraformaldehyde after 8 days in vitro and are processed for tyrosine hydroxylase, a specific marker for dopaminergic neurons, immunohistochemical staining. Dissociated cell cultures are prepared from embryonic rats. The culture medium is changed every third day and the factors are also added at that time.

[1131] Since the dopaminergic neurons are isolated from animals at gestation day 14, a developmental time which is past the stage when the dopaminergic precursor cells are proliferating, an increase in the number of tyrosine hydroxylase immunopositive neurons would represent an increase in the number of dopaminergic neurons surviving in vitro. Therefore, if an agonist or antagonist of the invention acts to prolong the survival of dopaminergic neurons, it would suggest that the agonist or antagonist may be involved in Parkinson's Disease.

[1132] The studies described in this example tested activity of agonists or antagonists of the invention. However, one skilled in the art could easily modify the exemplified studies to test the activity of polynucleotides or polypeptides of the invention (e.g., gene therapy).

### Example 25

### The Effect of Agonists or Antagonists of the Invention on the Growth of Vascular Endothelial Cells

[1133] On day 1, human umbilical vein endothelial cells (HUVEC) are seeded at 2-5×10⁴ cells/35 mm dish density in M199 medium containing 4% fetal bovine serum (FBS), 16 units/ml heparin, and 50 units/ml endothelial cell growth supplements (ECGS, Biotechnique, Inc.). On day 2, the medium is replaced with Ml99 containing 10% FBS, 8 units/ml heparin. An agonist or antagonist of the invention, and positive controls, such as VEGF and basic FGF (bFGF) are added, at varying concentrations. On days 4 and 6, the medium is replaced. On day 8, cell number is determined with a Coulter Counter.

[1134] An increase in the number of HUVEC cells indicates that the compound of the invention may proliferate vascular endothelial cells, while a decrease in the number of HUVEC cells indicates that the compound of the invention inhibits vascular endothelial cells.

[1135] The studies described in this example tested activity of a polypeptide of the invention. However, one skilled in the art could easily modify the exemplified studies to test the activity of polynucleotides (e.g., gene therapy), agonists, and/or antagonists of the invention.

### Example 26

### Rat Corneal Wound Healing Model

[1136] This animal model shows the effect of an agonist or antagonist of the invention on neovascularization. The experimental protocol includes:

[1137] Making a 1-1.5 mm long incision from the center of cornea into the stromal layer.

[1138] Inserting a spatula below the lip of the incision facing the outer corner of the eye.

[1139] Making a pocket (its base is 1-1.5 mm form the edge of the eye).

[1140] Positioning a pellet, containing 50 ng-5 ug of an agonist or antagonist of the invention, within the pocket.

[1141] Treatment with an agonist or antagonist of the invention can also be applied topically to the corneal wounds in a dosage range of 20 mg-500 mg (daily treatment for five days).

[1142] The studies described in this example tested activity of agonists or antagonists of the invention. However, one skilled in the art could easily modify the exemplified studies to test the activity of polynucleotides or polypeptides of the invention (e.g., gene therapy).

### Example 27

### Diabetic Mouse and Glucocorticoid-impaired Wound Healing Models

[1143] Diabetic db+/db+ Mouse Model.

[1144] To demonstrate that an agonist or antagonist of the invention accelerates the healing process, the genetically diabetic mouse model of wound healing is used. The fill thickness wound healing model in the db+/db+ mouse is a well characterized, clinically relevant and reproducible model of impaired wound healing. Healing of the diabetic wound is dependent on formation of granulation tissue and re-epithelialization rather than contraction (Gartner, M. H. et al., J. Surg. Res. 52:389 (1992); Greenhalgh, D. G. et al., Am. J. Pathol. 136:1235 (1990)).

[1145] The diabetic animals have many of the characteristic features observed in Type II diabetes mellitus. Homozygous (db+/db+) mice are obese in comparison to their normal heterozygous (db+/+m) littermates. Mutant diabetic (db+/db+) mice have a single autosomal recessive mutation on chromosome 4 (db+) (Coleman et al. Proc. Natl. Acad. Sci. USA 77:283-293 (1982)). Animals show polyphagia, polydipsia and polyuria. Mutant diabetic mice (db+/db+) have elevated blood glucose, increased or normal insulin levels, and suppressed cell-mediated immunity (Mandel et al., J. Immunol. 120:1375 (1978); Debray-Sachs, M. et al., Clin. Exp. Immunol. 51(1):1-7 (1983); Leiter et al., Am. J. of Pathol. 114:46-55 (1985)). Peripheral neuropathy, myocardial complications, and microvascular lesions, basement membrane thickening and glomerular filtration abnormalities have been described in these animals (Norido, F. et al., Exp. Neurol. 83(2):221-232 (1984); Robertson et al., Diabetes 29(1):60-67 (1980); Giacomelli et al., Lab Invest. 40(4):460-473 (1979); Coleman, D. L., Diabetes 31 (Suppl):1-6 (1982)). These homozygous diabetic mice develop hyperglycemia that is resistant to insulin analogous to human type II diabetes (Mandel et al., J. Immunol. 120:1375-1377 (1978)).

[1146] The characteristics observed in these animals suggests that healing in this model may be similar to the healing observed in human diabetes (Greenhalgh, et al., Am. J. of Pathol. 136:1235-1246 (1990)).

[1147] Genetically diabetic female C57BL/KsJ (db+/db+) mice and their non-diabetic (db+/+m) heterozygous littermates are used in this study (Jackson Laboratories). The animals are purchased at 6 weeks of age and are 8 weeks old at the beginning of the study. Animals are individually housed and received food and water ad libitum. All manipulations are performed using aseptic techniques. The experiments are conducted according to the rules and guidelines of Human Genome Sciences, Inc. Institutional Animal Care and Use Committee and the Guidelines for the Care and Use of Laboratory Animals.

[1148] Wounding protocol is performed according to previously reported methods (Tsuboi, R. and Rifkin, D. B., J. Exp. Med. 172:245-251 (1990)). Briefly, on the day of wounding, animals are anesthetized with an intraperitoneal injection of Avertin (0.01 mg/mL), 2,2,2-tribromoethanol and 2-methyl-2-butanol dissolved in deionized water. The dorsal region of the animal is shaved and the skin washed with 70% ethanol solution and iodine. The surgical area is dried with sterile gauze prior to wounding. An 8 mm full-thickness wound is then created using a Keyes tissue punch. Immediately following wounding, the surrounding skin is gently stretched to eliminate wound expansion. The wounds are left open for the duration of the experiment. Application of the treatment is given topically for 5 consecutive days commencing on the day of wounding. Prior to treatment, wounds are gently cleansed with sterile saline and gauze sponges.

[1149] Wounds are visually examined and photographed at a fixed distance at the day of surgery and at two day intervals thereafter. Wound closure is determined by daily measurement on days 1-5 and on day 8. Wounds are measured horizontally and vertically using a calibrated Jameson caliper. Wounds are considered heated if granulation tissue is no longer visible and the wound is covered by a continuous epithelium.

[1150] An agonist or antagonist of the invention is administered using at a range different doses, from 4 mg to 500 mg per wound per day for 8 days in vehicle. Vehicle control groups received 50 mL of vehicle solution.

[1151] Animals are euthanized on day 8 with an intraperitoneal injection of sodium pentobarbital (300 mg/kg). The wounds and surrounding skin are then harvested for histology and immunohistochemistry. Tissue specimens are placed in 10% neutral buffered formalin in tissue cassettes between biopsy sponges for further processing.

[1152] Three groups of 10 animals each (5 diabetic and 5 non-diabetic controls) are evaluated: 1) Vehicle placebo control, 2) untreated group, and 3) treated group.

[1153] Wound closure is analyzed by measuring the area in the vertical and horizontal axis and obtaining the total square area of the wound. Contraction is then estimated by establishing the differences between the initial wound area (day 0) and that of post-treatment (day 8). The wound area on day 1 is 64mm², the corresponding size of the dermal punch. Calculations are made using the following formula:

[Open area on day 8]−[Open area on day 1]/[Open area on day 1]

[1154] Specimens are fixed in 10% buffered formalin and paraffin embedded blocks are sectioned perpendicular to the wound surface (5 mm) and cut using a Reichert-Jung microtome. Routine hematoxylin-eosin (H&E) staining is performed on cross-sections of bisected wounds. Histologic examination of the wounds are used to assess whether the healing process and the morphologic appearance of the repaired skin is altered by treatment with an agonist or antagonist of the invention. This assessment included verification of the presence of cell accumulation, inflammatory cells, capillaries, fibroblasts, re-epithelialization and epidermal maturity (Greenhalgh, D. G. et al., Am. J. Pathol. 136:1235 (1990)). A calibrated lens micrometer is used by a blinded observer.

[1155] Tissue sections are also stained immunohistochemically with a polyclonal rabbit anti-human keratin antibody using ABC Elite detection system. Human skin is used as a positive tissue control while non-immune IgG is used as a negative control. Keratinocyte growth is determined by evaluating the extent of reepithelialization of the wound using a calibrated lens micrometer.

[1156] Proliferating cell nuclear antigen/cyclin (PCNA) in skin specimens is demonstrated by using anti-PCNA antibody (1:50) with an ABC Elite detection system. Human colon cancer served as a positive tissue control and human brain tissue is used as a negative tissue control. Each specimen included a section with omission of the primary antibody and substitution with non-immune mouse IgG. Ranking of these sections is based on the extent of proliferation on a scale of 0-8, the lower side of the scale reflecting slight proliferation to the higher side reflecting intense proliferation.

[1157] Experimental data are analyzed using an unpaired t test. A p value of <0.05 is considered significant.

[1158] Steroid Impaired Rat Model

[1159] The inhibition of wound healing by steroids has been well documented in various in vitro and in vivo systems (Wahl, Glucocorticoids and Wound healing. In: Anti-Inflammatory Steroid Action: Basic and Clinical Aspects. 280-302 (1989); Wahlet al., J. Immunol. 115: 476-481 (1975); Werb et al., J. Exp. Med. 147:1684-1694 (1978)). Glucocorticoids retard wound heating by inhibiting angiogenesis, decreasing vascular permeability (Ebert et al., An. Intern. Med. 37:701-705 (1952)), fibroblast proliferation, and collagen synthesis (Beck et al., Growth Factors. 5: 295-304 (1991); Haynes et al., J. Clin. Invest. 61: 703-797 (1978)) and producing a transient reduction of circulating monocytes (Haynes et al., J. Clin. Invest. 61: 703-797 (1978); Wahl, “Glucocorticoids and wound healing”, In: Antiinflammatory Steroid Action: Basic and Clinical Aspects, Academic Press, New York, pp. 280-302 (1989)). The systemic administration of steroids to impaired wound healing is a well establish phenomenon in rats (Beck et al., Growth Factors. 5: 295-304 (1991); Haynes et al., J. Clin. Invest. 61: 703-797 (1978); Wahl, “Glucocorticoids and wound healing”, In: Antiinflammatory Steroid Action: Basic and Clinical Aspects, Academic Press, New York, pp. 280-302 (1989); Pierce et al., Proc. Natl. Acad. Sci. USA 86: 2229-2233 (1989)).

[1160] To demonstrate that an agonist or antagonist of the invention can accelerate the healing process, the effects of multiple topical applications of the agonist or antagonist on full thickness excisional skin wounds in rats in which healing has been impaired by the systemic administration of methylprednisolone is assessed.

[1161] Young adult male Sprague Dawley rats weighing 250-300 g (Charles River Laboratories) are used in this example. The animals are purchased at 8 weeks of age and are 9 weeks old at the beginning of the study. The healing response of rats is impaired by the systemic administration of methylprednisolone (17mg/kg/rat intramuscularly) at the time of wounding. Animals are individually housed and received food and water ad libitum. All manipulations are performed using aseptic techniques. This study is conducted according to the rules and guidelines of Human Genome Sciences, Inc. Institutional Animal Care and Use Committee and the Guidelines for the Care and Use of Laboratory Animals.

[1162] The wounding protocol is followed according to section A, above. On the day of wounding, animals are anesthetized with an intramuscular injection of ketamine (50 mg/kg) and xylazine (5 mg/kg). The dorsal region of the animal is shaved and the skin washed with 70% ethanol and iodine solutions. The surgical area is dried with sterile gauze prior to wounding. An 8 mm full-thickness wound is created using a Keyes tissue punch. The wounds are left open for the duration of the experiment. Applications of the testing materials are given topically once a day for 7 consecutive days commencing on the day of wounding and subsequent to methylprednisolone administration. Prior to treatment, wounds are gently cleansed with sterile saline and gauze sponges.

[1163] Wounds are visually examined and photographed at a fixed distance at the day of wounding and at the end of treatment. Wound closure is determined by daily measurement on days 1-5 and on day 8. Wounds are measured horizontally and vertically using a calibrated Jameson caliper. Wounds are considered healed if granulation tissue is no longer visible and the wound is covered by a continuous epithelium.

[1164] The agonist or antagonist of the invention is administered using at a range different doses, from 4 mg to 500 mg per wound per day for 8 days in vehicle. Vehicle control groups received 50 mL of vehicle solution.

[1165] Animals are euthanized on day 8 with an intraperitoneal injection of sodium pentobarbital (300 mg/kg). The wounds and surrounding skin are then harvested for histology. Tissue specimens are placed in 10% neutral buffered fornalin in tissue cassettes between biopsy sponges for further processing.

[1166] Three groups of 10 animals each (5 with methylprednisolone and 5 without glucocorticoid) are evaluated: 1) Untreated group 2) Vehicle placebo control 3) treated groups.

[1167] Wound closure is analyzed by measuring the area in the vertical and horizontal axis and obtaining the total area of the wound. Closure is then estimated by establishing the differences between the initial wound area (day 0) and that of post treatment (day 8). The wound area on day 1 is 64 mm , the corresponding size of the dermal punch. Calculations are made using the following formula:

[Open area on day 8]−[Open area on day 1]/[Open area on day 1]

[1168] Specimens are fixed in 10% buffered formalin and paraffin embedded blocks are sectioned perpendicular to the wound surface (5 mm) and cut using an Olympus microtome. Routine hematoxylin-eosin (H&E) staining is performed on cross-sections of bisected wounds. Histologic examination of the wounds allows assessment of whether the healing process and the morphologic appearance of the repaired skin is improved by treatment with an agonist or antagonist of the invention. A calibrated lens micrometer is used by a blinded observer to determine the distance of the wound gap.

[1169] Experimental data are analyzed using an unpaired t test. A p value of <0.05 is considered significant.

[1170] The studies described in this example tested activity of agonists or antagonists of the invention. However, one skilled in the art could easily modify the exemplified studies to test the activity of polynucleotides or polypeptides of the invention (e.g., gene therapy).

### Example 28

### Lymphadema Animal Model

[1171] The purpose of this experimental approach is to create an appropriate and consistent lymphedema model for testing the therapeutic effects of an agonist or antagonist of the invention in lymphangiogenesis and re-establishment of the lymphatic circulatory system in the rat hind limb. Effectiveness is measured by swelling volume of the affected limb, quantification of the amount of lymphatic vasculature, total blood plasma protein, and histopathology. Acute lymphedema is observed for 7-10 days. Perhaps more importantly, the chronic progress of the edema is followed for up to 3-4 weeks.

[1172] Prior to beginning surgery, blood sample is drawn for protein concentration analysis. Male rats weighing approximately ˜350 g are dosed with Pentobarbital. Subsequently, the right legs are shaved from knee to hip. The shaved area is swabbed with gauze soaked in 70% EtOH. Blood is drawn for serum total protein testing. Circumference and volumetric measurements are made prior to injecting dye into paws after marking 2 measurement levels (0.5 cm above heel, at mid-pt of dorsal paw). The intradermal dorsum of both right and left paws are injected with 0.05 ml of 1% Evan's Blue. Circumference and volumetric measurements are then made following injection of dye into paws.

[1173] Using the knee joint as a landmark, a mid-leg inguinal incision is made circumferentially allowing the femoral vessels to be located. Forceps and hemostats are used to dissect and separate the skin flaps. After locating the femoral vessels, the lymphatic vessel that runs along side and underneath the vessel(s) is located. The main lymphatic vessels in this area are then electrically coagulated or suture ligated.

[1174] Using a microscope, muscles in back of the leg (near the semitendinosis and adductors) are bluntly dissected. The popliteal lymph node is then located. The 2 proximal and 2 distal lymphatic vessels and distal blood supply of the popliteal node are then ligated by suturing. The popliteal lymph node, and any accompanying adipose tissue, is then removed by cutting connective tissues.

[1175] Care is taken to control any mild bleeding resulting from this procedure. After lymphatics are occluded, the skin flaps are sealed by using liquid skin (Vetbond) (AJ Buck). The separated skin edges are sealed to the underlying muscle tissue while leaving a gap of ˜0.5 cm around the leg. Skin also may be anchored by suturing to underlying muscle when necessary.

[1176] To avoid infection, animals are housed individually with mesh (no bedding). Recovering animals are checked daily through the optimal edematous peak, which typically occurred by day 5-7. The plateau edematous peak are then observed. To evaluate the intensity of the lymphedema, the circumference and volumes of 2 designated places on each paw before operation and daily for 7 days are measured. The effect of plasma proteins on lymphedema is determined and whether protein analysis is a useful testing perimeter is also investigated. The weights of both control and edematous limbs are evaluated at 2 places. Analysis is performed in a blind manner.

[1177] Circumference Measurements: Under brief gas anesthetic to prevent limb movement, a cloth tape is used to measure limb circumference. Measurements are done at the ankle bone and dorsal paw by 2 different people and those 2 readings are averaged. Readings are taken from both control and edematous limbs.

[1178] Volumetric Measurements: On the day of surgery, animals are anesthetized with Pentobarbital and are tested prior to surgery. For daily volumetrics animals are under brief halothane anesthetic (rapid immobilization and quick recovery), and both legs are shaved and equally marked using waterproof marker on legs. Legs are first dipped in water, then dipped into instrument to each marked level, then measured by Buxco edema software(Chen/Victor). Data is recorded by one person, while the other is dipping the limb to marked area.

[1179] Blood-plasma protein measurements: Blood is drawn, spun, and serum separated prior to surgery and then at conclusion for total protein and Ca2⁺ comparison.

[1180] Limb Weight Comparison: After drawing blood, the animal is prepared for tissue collection. The limbs are amputated using a quillitine, then both experimental and control legs are cut at the ligature and weighed. A second weighing is done as the tibio-cacaneal joint is disarticulated and the foot is weighed.

[1181] Histological Preparations: The transverse muscle located behind the knee (popliteal) area is dissected and arranged in a metal mold, filled with freezeGel, dipped into cold methylbutane, placed into labeled sample bags at −80EC until sectioning. Upon sectioning, the muscle is observed under fluorescent microscopy for lymphatics.

[1182] The studies described in this example tested activity of agonists or antagonists of the invention. However, one skilled in the art could easily modify the exemplified studies to test the activity of polynucleotides or polypeptides of the invention (e.g., gene therapy).

### Example 29

### Suppression of TNF Alpha-induced Adhesion Molecule Expression by a Agonist or Antagonist of the Invention

[1183] The recruitment of lymphocytes to areas of inflammation and angiogenesis involves specific receptor-ligand interactions between cell surface adhesion molecules (CAMs) on lymphocytes and the vascular endothelium. The adhesion process, in both normal and pathological settings, follows a multi-step cascade that involves intercellular adhesion molecule-1 (ICAM-1), vascular cell adhesion molecule-1 (VCAM-1), and endothelial leukocyte adhesion molecule-1 (E-selectin) expression on endothelial cells (EC). The expression of these molecules and others on the vascular endothelium determines the efficiency with which leukocytes may adhere to the local vasculature and extravasate into the local tissue during the development of an inflammatory response. The local concentration of cytokines and growth factor participate in the modulation of the expression of these CAMs.

[1184] Tumor necrosis factor alpha (TNF-a), a potent proinflammatory cytokine, is a stimulator of all three CAMs on endothelial cells and may be involved in a wide variety of inflammatory responses, often resulting in a pathological outcome.

[1185] The potential of an agonist or antagonist of the invention to mediate a suppression of TNF-a induced CAM expression can be examined. A modified ELISA assay which uses ECs as a solid phase absorbent is employed to measure the amount of CAM expression on TNF-a treated ECs when co-stimulated with a member of the FGF family of proteins.

[1186] To perform the experiment, human umbilical vein endothelial cell (HUVEC) cultures are obtained from pooled cord harvests and maintained in growth medium (EGM-2; Clonetics, San Diego, Calif.) supplemented with 10% FCS and 1% penicillin/streptomycin in a 37 degree C humidified incubator containing 5% CO₂. HUVECs are seeded in 96-well plates at concentrations of 1×10⁴ cells/well in EGM medium at 37 degree C for 18-24 hrs or until confluent. The monolayers are subsequently washed 3 times with a serum-free solution of RPMI-1640 supplemented with 100 U/ml penicillin and 100 mg/ml streptomycin, and treated with a given cytokine and/or growth factor(s) for 24 h at 37 degree C. Following incubation, the cells are then evaluated for CAM expression.

[1187] Human Umbilical Vein Endothelial cells (HUVECs) are grown in a standard 96 well plate to confluence. Growth medium is removed from the cells and replaced with 90 ul of 199 Medium (10% FBS). Samples for testing and positive or negative controls are added to the plate in triplicate (in 10 ul volumes). Plates are incubated at 37 degree C for either 5 h (selectin and integrin expression) or 24 h (integrin expression only). Plates are aspirated to remove medium and 100 μl of 0.1% paraformaldehyde-PBS(with Ca++ and Mg++) is added to each well. Plates are held at 4° C. for 30 min.

[1188] Fixative is then removed from the wells and wells are washed 1× with PBS(+Ca,Mg)+0.5% BSA and drained. Do not allow the wells to dry. Add 10 μl of diluted primary antibody to the test and control wells. Anti-ICAM-1-Biotin, Anti-VCAM-1-Biotin and Anti-E-selectin-Biotin are used at a concentration of 10 μg/ml (1:10 dilution of 0.1 mg/ml stock antibody). Cells are incubated at 37° C. for 30 min. in a humidified environment. Wells are washed ×3 with PBS(+Ca,Mg)+0.5% BSA.

[1189] Then add 20 μl of diluted ExtrAvidin-Alkaline Phosphotase (1:5,000 dilution) to each well and incubated at 37° C. for 30 min. Wells are washed ×3 with PBS(+Ca,Mg)+0.5% BSA. 1 tablet of p-Nitrophenol Phosphate pNPP is dissolved in 5 ml of glycine buffer (pH 10.4). 100 μl of pNPP substrate in glycine buffer is added to each test well. Standard wells in triplicate are prepared from the working dilution of the ExtrAvidin-Alkaline Phosphotase in glycine buffer: 1:5,000 (10⁰)>10^{-0.5}>10⁻¹>10^{-1.5}.5 μl of each dilution is added to triplicate wells and the resulting AP content in each well is 5.50 ng, 1.74 ng, 0.55 ng, 0.18 ng. 100 μl of pNNP reagent must then be added to each of the standard wells. The plate must be incubated at 37° C. for 4 h. A volume of 50 μl of 3M NaOH is added to all wells. The results are quantified on a plate reader at 405 nm. The background subtraction option is used on blank wells filled with glycine buffer only. The template is set up to indicate the concentration of AP-conjugate in each standard well [5.50 ng; 1.74 ng; 0.55 ng; 0.18 ng]. Results are indicated as amount of bound AP-conjugate in each sample.

[1190] The studies described in this example tested activity of agonists or antagonists of the invention. However, one skilled in the art could easily modify the exemplified studies to test the activity of polynucleotides or polypeptides of the invention (e.g., gene therapy).

### Example 30

### Production of Polypeptide of the Invention hor High-throughput Screening Assays

[1191] The following protocol produces a supernatant containing polypeptide of the present invention to be tested. This supernatant can then be used in the Screening Assays described in Examples 32-41.

[1192] First, dilute Poly-D-Lysine (644 587 Boehringer-Mannheim) stock solution (1 mg/ml in PBS) 1:20 in PBS (w/o calcium or magnesium 17-516F Biowhittaker) for a working solution of 50 ug/ml. Add 200 ul of this solution to each well (24 well plates) and incubate at RT for 20 minutes. Be sure to distribute the solution over each well (note: a 12-channel pipetter may be used with tips on every other channel). Aspirate off the Poly-D-Lysine solution and rinse with 1 ml PBS (Phosphate Buffered Saline). The PBS should remain in the well until just prior to plating the cells and plates may be poly-lysine coated in advance for up to two weeks.

[1193] Plate 293T cells (do not carry cells past P+20) at 2×10⁵ cells/well in 0.5 ml DMEM(Dulbecco's Modified Eagle Medium)(with 4.5 G/L glucose and L-glutamine (12-604F Biowhittaker))/10% heat inactivated FBS(14-503F Biowhittaker)/1× Penstrep(17-602E Biowhittaker). Let the cells grow overnight.

[1194] The next day, mix together in a sterile solution basin: 300 ul Lipofectamine (18324-012 Gibco/BRL) and 5ml Optimem 1 (31985070 Gibco/BRL)/96-well plate. With a small volume multi-channel pipetter, aliquot approximately 2 ug of an expression vector containing a polynucleotide insert, produced by the methods described in Examples 8-10, into an appropriately labeled 96-well round bottom plate. With a multi-channel pipetter, add 50 ul of the Lipofectamine/Optimem I mixture to each well. Pipette up and down gently to mix. Incubate at RT 15-45 minutes. After about 20 minutes, use a multi-channel pipetter to add 150 ul Optimem I to each well. As a control, one plate of vector DNA lacking an insert should be transfected with each set of transfections.

[1195] Preferably, the transfection should be performed by tag-teaming the following tasks. By tag-teaming, hands on time is cut in half, and the cells do not spend too much time on PBS. First, person A aspirates off the media from four 24-well plates of cells, and then person B rinses each well with 0.5-1 ml PBS. Person A then aspirates off PBS rinse, and person B, using al2-channel pipetter with tips on every other channel, adds the 200 ul of DNA/Lipofectamine/Optimem I complex to the odd wells first, then to the even wells, to each row on the 24-well plates. Incubate at 37 degree C for 6 hours.

[1196] While cells are incubating, prepare appropriate media, either 1%BSA in DMEM with 1× penstrep, or HGS CHO-5 media (116.6 mg/L of CaCl₂ (anhyd); 0.00130 mg/L CuSO₄-5H₂O; 0.050 mg/L of Fe(NO₃)₃-9H₂O; 0.417 mg/L of FeSO₄-7H₂O; 311.80 mg/L of Kcl; 28.64 mg/L of MgCl₂; 48.84 mg/L of MgSO₄; 6995.50 mg/L of NaCl; 2400.0 mg/L of NaHCO₃; 62.50 mg/L of NaH₂PO₄-H₂O; 71.02 mg/L of Na₂HPO₄; 0.4320 mg/L of ZnSO₄-7H₂O; 0.002 mg/L of Arachidonic Acid; 1.022 mg/L of Cholesterol; 0.070 mg/L of DL-alpha-Tocopherol-Acetate; 0.0520 mg/L of Linoleic Acid; 0.010 mg/L of Linolenic Acid; 0.010 mg/L of Myristic Acid; 0.010 mg/L of Oleic Acid; 0.010 mg/L of Palmitric Acid; 0.010 mg/L of Palmitic Acid; 100 mg/L of Pluronic F-68; 0.010 mg/L of Stearic Acid; 2.20 mg/L of Tween 80; 4551 mg/L of D-Glucose; 130.85 mg/ml of L-Alanine; 147.50 mg/ml of L-Arginine-HCL; 7.50 mg/ml of L-Asparagine-H₂O; 6.65 mg/ml of L-Aspartic Acid; 29.56 mg/ml of L-Cystine-2HCL-H₂O; 31.29 mg/ml of L-Cystine-2HCL; 7.35 mg/ml of L-Glutamic Acid; 365.0 mg/ml of L-Glutamine; 18.75 mg/ml of Glycine; 52.48 mg/ml of L-Histidine-HCL-H₂O; 106.97 mg/ml of L-Isoleucine; 111.45 mg/ml of L-Leucine; 163.75 mg/ml of L-Lysine HCL; 32.34 mg/ml of L-Methionine; 68.48 mg/ml of L-Phenylalainine; 40.0 mg/ml of L-Proline; 26.25 mg/ml of L-Serine; 101.05 mg/ml of L-Threonine; 19.22 mg/ml of L-Tryptophan; 91.79 mg/ml of L-Tryrosine-2Na-2H₂O; and 99.65 mg/ml of L-Valine; 0.0035 mg/L of Biotin; 3.24 mg/L of D-Ca Pantothenate; 11.78 mg/L of Choline Chloride; 4.65 mg/L of Folic Acid; 15.60 mg/L of i-Inositol; 3.02 mg/L of Niacinamide; 3.00 mg/L of Pyridoxal HCL; 0.031 mg/L of Pyridoxine HCL; 0.319 mg/L of Riboflavin; 3.17 mg/L of Thiamine HCL; 0.365 mg/L of Thymidine; 0.680 mg/L of Vitamin B₁₂; 25 mM of HEPES Buffer; 2.39 mg/L of Na Hypoxanthine; 0.105 mg/L of Lipoic Acid; 0.081 mg/L of Sodium Putrescine-2HCL; 55.0 mg/L of Sodium Pyruvate; 0.0067 mg/L of Sodium Selenite; 20 uM of Ethanolamine; 0.122 mg/L of Ferric Citrate; 41.70 mg/L of Methyl-B-Cyclodextrin complexed with Linoleic Acid; 33.33 mg/L of Methyl-B-Cyclodextrin complexed with Oleic Acid; 10 mg/L of Methyl-B-Cyclodextrin complexed with Retinal Acetate. Adjust osmolarity to 327 mOsm) with 2mm glutamine and 1× penstrep. (BSA (81-068-3 Bayer) 100 gm dissolved in 1 L DMEM for a 10% BSA stock solution). Filter the media and collect 50 ul for endotoxin assay in 15 ml polystyrene conical.

[1197] The transfection reaction is terminated, preferably by tag-teaming, at the end of the incubation period. Person A aspirates off the transfection media, while person B adds 1.5ml appropriate media to each well. Incubate at 37 degree C for 45 or 72 hours depending on the media used: 1%BSA for 45 hours or CHO-5 for 72 hours.

[1198] On day four, using a 300 ul multichannel pipetter, aliquot 600 ul in one 1 ml deep well plate and the remaining supernatant into a 2 ml deep well. The supernatants from each well can then be used in the assays described in Examples 32-39.

[1199] It is specifically understood that when activity is obtained in any of the assays described below using a supernatant, the activity originates from either the polypeptide of the present invention directly (e.g., as a secreted protein) or by polypeptide of the present invention inducing expression of other proteins, which are then secreted into the supernatant. Thus, the invention further provides a method of identifying the protein in the supernatant characterized by an activity in a particular assay.

### Example 31

### Construction of GAS Reporter Construct

[1200] One signal transduction pathway involved in the differentiation and proliferation of cells is called the Jaks-STATs pathway. Activated proteins in the Jaks-STATs pathway bind to gamma activation site “GAS” elements or interferon-sensitive responsive element (“ISRE”), located in the promoter of many genes. The binding of a protein to these elements alter the expression of the associated gene.

[1201] GAS and ISRE elements are recognized by a class of transcription factors called Signal Transducers and Activators of Transcription, or “STATs.” There are six members of the STATs family. Statl and Stat3 are present in many cell types, as is Stat2 (as response to IFN-alpha is widespread). Stat4 is more restricted and is not in many cell types though it has been found in T helper class I, cells after treatment with IL-12. Stat5 was originally called mammary growth factor, but has been found at higher concentrations in other cells including myeloid cells. It can be activated in tissue culture cells by many cytokines.

[1202] The STATs are activated to translocate from the cytoplasm to the nucleus upon tyrosine phosphorylation by a set of kinases known as the Janus Kinase (“Jaks”) family. Jaks represent a distinct family of soluble tyrosine kinases and include Tyk2, Jak1, Jak2, and Jak3. These kinases display significant sequence similarity and are generally catalytically inactive in resting cells.

[1203] The Jaks are activated by a wide range of receptors summarized in the Table below. (Adapted from review by Schidler and Darnell, Ann. Rev. Biochem. 64:621-51 (1995).) A cytokine receptor family, capable of activating Jaks, is divided into two groups: (a) Class 1 includes receptors for IL-2, IL-3, IL-4, IL-6, IL-7, IL-9, IL-11, IL-12, IL-15, Epo, PRL, GH, G-CSF, GM-CSF, LIF, CNTF, and thrombopoietin; and (b) Class 2 includes IFN-a, IFN-g, and IL-10. The Class I receptors share a conserved cysteine motif (a set of four conserved cysteines and one tryptophan) and a WSXWS motif (a membrane proximal region encoding Trp-Ser-Xaa-Trp-Ser (SEQ ID NO:2)).

[1204] Thus, on binding of a ligand to a receptor, Jaks are activated, which in turn activate STATs, which then translocate and bind to GAS elements. This entire process is encompassed in the Jaks-STATs signal transduction pathway.

[1205] Therefore, activation of the Jaks-STATs pathway, reflected by the binding of the GAS or the ISRE element, can be used to indicate proteins involved in the proliferation and differentiation of cells. For example, growth factors and cytokines are known to activate the Jaks-STATs pathway. (See Table below.) Thus, by using GAS elements linked to reporter molecules, activators of the Jaks-STATs pathway can be identified.

| JAKs | STATS | GAS (elements) or ISRE | | | | |
|---|---|---|---|---|---|---|
| Ligand | tyk2 | Jak1 | Jak2 | Jak3 | | |
| IFN family | | | | | | |
| IFN-a/B | + | + | − | − | 1,2,3 | ISRE |
| IFN-g | | + | + | − | 1 | GAS (IRF1 > Lys6 > IFP) |
| Il-10 | + | ? | ? | − | 1,3 | |
| gp130 family | | | | | | |
| IL-6 (Pleiotrohic) | + | + | + | ? | 1,3 | GAS (IRF1 > Lys6 > IFP) |
| Il-11 (Pleiotrohic) | ? | + | ? | ? | 1,3 | |
| OnM (Pleiotrohic) | ? | + | + | ? | 1,3 | |
| LIF (Pleiotrohic) | ? | + | + | ? | 1,3 | |
| CNTF (Pleiotrohic) | −/+ | + | + | ? | 1,3 | |
| G-CSF (Pleiotrohic) | ? | + | ? | ? | 1,3 | |
| IL-12 (Pleiotrohic) | + | − | + | + | 1,3 | |
| g-C family | | | | | | |
| IL-2 (lymphocytes) | − | + | − | + | 1,3,5 | GAS |
| IL-4 (lymph/myeloid) | − | + | − | + | 6 | GAS (IRF1 = IFP >> Ly6)(IgH) |
| IL-7 (lymphocytes) | − | + | − | + | 5 | GAS |
| IL-9 (lymphocytes) | − | + | − | + | 5 | GAS |
| IL-13 (lymphocyte) | − | + | ? | ? | 6 | GAS |
| IL-15 | ? | + | ? | + | 5 | GAS |
| gp140 family | | | | | | |
| IL-3 (myeloid) | − | − | + | − | 5 | GAS (IRF1 > IFP >> Ly6) |
| IL-5 (myeloid) | − | − | + | − | 5 | GAS |
| GM-CSF (myeloid) | − | − | + | − | 5 | GAS |
| Growth hormone family | | | | | | |
| GH | ? | − | + | − | 5 | |
| PRL | ? | +/− | + | − | 1,3,5 | |
| EPO | ? | − | + | − | 5 | GAS(B-CAS > IRF1 = IFP >> Ly6) |
| Receptor Tyrosine Kinases | | | | | | |
| EGF | ? | + | + | − | 1,3 | GAS (IRF1) |
| PDGF | ? | + | + | − | 1,3 | |
| CSF-1 | ? | + | + | − | 1,3 | GAS (not IRF1) |

[1206] To construct a synthetic GAS containing promoter element, which is used in the Biological Assays described in Examples 32-33, a PCR based strategy is employed to generate a GAS-SV40 promoter sequence. The 5′ primer contains four tandem copies of the GAS binding site found in the IRFI promoter and previously demonstrated to bind STATs upon induction with a range of cytokines (Rothman et al., Immunity 1:457-468 (1994).), although other GAS or ISRE elements can be used instead. The 5′ primer also contains 18bp of sequence complementary to the SV40 early promoter sequence and is flanked with an XhoI site. The sequence of the 5′ primer is:

| | |
|---|---|
| 5′:GCGCCTCGAGATTTCCCCGAAATCTAGATTTCCCCGAAATGATTTCCCCG | (SEQ ID NO: 3) |
| AAATGATTTCCCCGAAATATCTGCCATCTCAATTAG:3′ | |

[1207] The downstream primer is complementary to the SV40 promoter and is flanked with a Hind III site: 5′:GCGGCAAGCTTTTTGCAAAGCCTAGGC:3′(SEQ ID NO: 4)

[1208] PCR amplification is performed using the SV40 promoter template present in the B-gal:promoter plasmid obtained from Clontech. The resulting PCR fragment is digested with XhoI/Hind III and subcloned into BLSK2-. (Stratagene.) Sequencing with forward and reverse primers confirns that the insert contains the following sequence:

| | |
|---|---|
| 5′:CTCGAGATTTCCCCGAAATCTAGATTTCCCCGAAATGATTTCCCCGAAAT | (SEQ ID NO: 5) |
| GATTTCCCCGAAATATCTGCCATCTCAATTAGTCAGCAACCATAGTCCCGC | |
| CCCTAACTCCGCCCATCCCGCCCCTAACTCCGCCCAGTTCCGCCCATTCTCC | |
| GCCCCATGGCTGACTAATTTTTTTTATTTATGCAGAGGCCGAGGCCGCCTC | |
| GGCCTCTGAGCTATTCCAGAAGTAGTGAGGAGGCTTTTTTGGAGGCCTAGG | |
| CTTTTGCAAAAAGCTT:3′ | |

[1209] With this GAS promoter element linked to the SV40 promoter, a GAS:SEAP2 reporter construct is next engineered. Here, the reporter molecule is a secreted alkaline phosphatase, or “SEAP.” Clearly, however, any reporter molecule Ican be used instead of SEAP, in this or in any of the other Examples. Well known reporter molecules that can be used instead of SEAP include chloramphenicol acetyltransferase (CAT), luciferase, alkaline phosphatase, B-galactosidase, green fluorescent protein (GFP), or any protein detectable by an antibody.

[1210] The above sequence confirmed synthetic GAS-SV40 promoter element is subcloned into the pSEAP-Promoter vector obtained from Clontech using HindIII and XhoI, effectively replacing the SV40 promoter with the amplified GAS:SV40 promoter element, to create the GAS-SEAP vector. However, this vector does not contain a neomycin resistance gene, and therefore, is not preferred for mammalian expression systems.

[1211] Thus, in order to generate mammalian stable cell lines expressing the GAS-SEAP reporter, the GAS-SEAP cassette is removed from the GAS-SEAP vector using SalI and NotI, and inserted into a backbone vector containing the neomycin resistance gene, such as pGFP-1 (Clontech), using these restriction sites in the multiple cloning site, to create the GAS-SEAP/Neo vector. Once this vector is transfected into mammalian cells, this vector can then be used as a reporter molecule for GAS binding as described in Examples 32-33.

[1212] Other constructs can be made using the above description and replacing GAS with a different promoter sequence. For example, construction of reporter molecules containing NFK-B and EGR promoter sequences are described in Examples 34 and 35. However, many other promoters can be substituted using the protocols described in these Examples. For instance, SRE, IL-2, NFAT, or Osteocalcin promoters can be substituted, alone or in combination (e.g., GAS/NF-KB/EGR, GAS/NF-KB, 11-2/NFAT, or NF-KB/GAS). Similarly, other cell lines can be used to test reporter construct activity, such as HELA (epithelial), HUVEC (endothelial), Reh (B-cell), Saos-2 (osteoblast), HUVAC (aortic), or Cardiomyocyte.

### Example 32

### High-throughput Screening Assay for T-cell Activity

[1213] The following protocol is used to assess T-cell activity by identifying factors, and determining whether supernate containing a polypeptide of the invention proliferates and/or differentiates T-cells. T-cell activity is assessed using the GAS/SEAP/Neo construct produced in Example 31. Thus, factors that increase SEAP activity indicate the ability to activate the Jaks-STATS signal transduction pathway. The T-cell used in this assay is Jurkat T-cells (ATCC Accession No. TIB-152), although Molt-3 cells (ATCC Accession No. CRL-1552) and Molt-4 cells (ATCC Accession No. CRL-1582) cells can also be used.

[1214] Jurkat T-cells are lymphoblastic CD4+ Th1 helper cells. In order to generate stable cell lines, approximately 2 million Jurkat cells are transfected with the GAS-SEAP/neo vector using DMRIE-C (Life Technologies)(transfection procedure described below). The transfected cells are seeded to a density of approximately 20,000 cells per well and transfectants resistant to 1 mg/ml genticin selected. Resistant colonies are expanded and then tested for their response to increasing concentrations of interferon gamma. The dose response of a selected clone is demonstrated.

[1215] Specifically, the following protocol will yield sufficient cells for 75 wells containing 200 ul of cells. Thus, it is either scaled up, or performed in multiple to generate sufficient cells for multiple 96 well plates. Jurkat cells are maintained in RPMI+10% serum with 1%Pen-Strep. Combine 2.5 mls of OPTI-MEM (Life Technologies) with 10 ug of plasmid DNA in a T25 flask. Add 2.5 ml OPTI-MEM containing 50 ul of DMRIE-C and incubate at room temperature for 15-45 mins.

[1216] During the incubation period, count cell concentration, spin down the required number of cells (1 per transfection), and resuspend in OPTI-MEM to a final concentration of 107 cells/ml. Then add Iml of 1×10⁷ cells in OPTI-MEM to T25 flask and incubate at 37 degree C for 6 hrs. After the incubation, add 10 ml of RPMI+15% serum.

[1217] The Jurkat:GAS-SEAP stable reporter lines are maintained in RPMI+10% serum, 1 mg/ml Genticin, and 1% Pen-Strep. These cells are treated with supernatants containing polypeptide of the present invention or polypeptide of the present invention induced polypeptides as produced by the protocol described in Example 30.

[1218] On the day of treatment with the supernatant, the cells should be washed and resuspended in fresh RPMI+10% serum to a density of 500,000 cells per ml. The exact number of cells required will depend on the number of supernatants being screened. For one 96 well plate, approximately 10 million cells (for 10 plates, 100 million cells) are required.

[1219] Transfer the cells to a triangular reservoir boat, in order to dispense the cells into a 96 well dish, using a 12 channel pipette. Using a 12 channel pipette, transfer 200 ul of cells into each well (therefore adding 100,000 cells per well).

[1220] After all the plates have been seeded, 50 ul of the supernatants are transferred directly from the 96 well plate containing the supernatants into each well using a 12 channel pipette. In addition, a dose of exogenous interferon gamma (0.1, 1.0, 10 ng) is added to wells H9, H10, and H11 to serve as additional positive controls for the assay.

[1221] The 96 well dishes containing Jurkat cells treated with supernatants are placed in an incubator for 48 hrs (note: this time is variable between 48-72 hrs). 35 ul samples from each well are then transferred to an opaque 96 well plate using a 12 channel pipette. The opaque plates should be covered (using sellophene covers) and stored at −20 degree C until SEAP assays are performed according to Example 36. The plates containing the remaining treated cells are placed at 4 degree C and serve as a source of material for repeating the assay on a specific well if desired.

[1222] As a positive control, 100 Unit/ml interferon gamma can be used which is known to activate Jurkat T cells. Over 30 fold induction is typically observed in the positive control wells.

[1223] The above protocol may be used in the generation of both transient, as well as stable, transfected cells, which would be apparent to those of skill in the art.

### Example 33

### High-throughput Screening Assay Identifying Myeloid Activity

[1224] The following protocol is used to assess myeloid activity of polypeptide of the present invention by determining whether polypeptide of the present invention proliferates and/or differentiates myeloid cells. Myeloid cell activity is assessed using the GAS/SEAP/Neo construct produced in Example 31. Thus, factors that increase SEAP activity indicate the ability to activate the Jaks-STATS signal transduction pathway. The myeloid cell used in this assay is U937, a pre-monocyte cell line, although TF-1, HL60, or KG1 can be used.

[1225] To transiently transfect U937 cells with the GAS/SEAP/Neo construct produced in Example 31, a DEAE-Dextran method (Kharbanda et. al., 1994, Cell Growth & Differentiation, 5:259-265) is used. First, harvest 2×10⁷ U937 cells and wash with PBS. The U937 cells are usually grown in RPMI 1640 medium containing 10% heat-inactivated fetal bovine serum (FBS) supplemented with 100 units/ml penicillin and 100 mg/ml streptomycin.

[1226] Next, suspend the cells in 1 ml of 20 mM Tris-HCl (pH 7.4) buffer containing 0.5 mg/ml DEAE-Dextran, 8 ug GAS-SEAP2 plasmid DNA, 140 mM NaCl, 5 mM KCI, 375 uM Na₂HPO₄.7H₂O, 1 mM MgCl₂, and 675 uM CaCl₂. Incubate at 37 degrees C for 45 min.

[1227] Wash the cells with RPMI 1640 medium containing 10% FBS and then resuspend in 10 ml complete medium and incubate at 37 degree C for 36 hr.

[1228] The GAS-SEAP/U937 stable cells are obtained by growing the cells in 400 ug/ml G418. The G418-free medium is used for routine growth but every one to two months, the cells should be re-grown in 400 ug/ml G41 8 for couple of passages.

[1229] These cells are tested by harvesting 1×10⁸ cells (this is enough for ten 96-well plates assay) and wash with PBS. Suspend the cells in 200 ml above described growth medium, with a final density of 5×10⁵ cells/ml. Plate 200 ul cells per well in the 96-well plate (or 1×10⁵ cells/well).

[1230] Add 50 ul of the supernatant prepared by the protocol described in Example 30. Incubate at 37 degee C for 48 to 72 hr. As a positive control, 100 Unit/ml interferon gamma can be used which is known to activate U937 cells. Over 30 fold induction is typically observed in the positive control wells. SEAP assay the supematant according to the protocol described in Example 36.

### Example 34

### High-throughput Screening Assay Identifying Neuronal Activity

[1231] When cells undergo differentiation and proliferation, a group of genes are activated through many different signal transduction pathways. One of these genes, EGR1 (early growth response gene 1), is induced in various tissues and cell types upon activation. The promoter of EGRI is responsible for such induction. Using the EGR1 promoter linked to reporter molecules, activation of cells can be assessed by polypeptide of the present invention.

[1232] Particularly, the following protocol is used to assess neuronal activity in PC12 cell lines. PC12 cells (rat phenochromocytoma cells) are known to proliferate and/or differentiate by activation with a number of mitogens, such as TPA (tetradecanoyl phorbol acetate), NGF (nerve growth factor), and EGF (epidermal growth factor). The EGRI gene expression is activated during this treatment. Thus, by stably transfecting PC12 cells with a construct containing an EGR promoter linked to SEAP reporter, activation of PC12 cells by polypeptide of the present invention can be assessed.

[1233] The EGR/SEAP reporter construct can be assembled by the following protocol. The EGR-1 promoter sequence (−633 to +1)(Sakamoto K et al., Oncogene 6:867-871 (1991)) can be PCR amplified from human genomic DNA using the following primers:

| 5′GCGCTCGAGGGATGACAGCGATAGAACCCCGG- | (SEQ ID NO: 6) |
|---|---|
| 3′ | |
| 5′GCGAAGCTTCGCGACTCCCCGGATCCGCCTC- | (SEQ ID NO: 7) |
| 3′ | |

[1234] Using the GAS:SEAPINeo vector produced in Example 31, EGR1 amplified product can then be inserted into this vector. Linearize the GAS:SEAP/Neo vector using restriction enzymes XhoI/HindIII, removing the GAS/SV40 stuffer. Restrict the EGR1 amplified product with these same enzymes. Ligate the vector and the EGRI promoter.

[1235] To prepare 96 well-plates for cell culture, two mis of a coating solution (1:30 dilution of collagen type I (Upstate Biotech Inc. Cat#08-115) in 30% ethanol (filter sterilized)) is added per one 10 cm plate or 50 ml per well of the 96-well plate, and allowed to air dry for 2 hr.

[1236] PC12 cells are routinely grown in RPMI-1640 medium (Bio Whittaker) containing 10% horse serum (JRH BIOSCIENCES, Cat. # 12449-78P), 5% heat-inactivated fetal bovine serum (FBS) supplemented with 100 units/ml penicillin and 100 ug/ml streptomycin on a precoated 10 cm tissue culture dish. One to four split is done every three to four days. Cells are removed from the plates by scraping and resuspended with pipetting up and down for more than 15 times.

[1237] Transfect the EGR/SEAP/Neo construct into PC12 using the Lipofectamine protocol described in Example 30. EGR-SEAP/PC12 stable cells are obtained by growing the cells in 300 ug/ml G418. The G418-free medium is used for routine growth but every one to two months, the cells should be re-grown in 300 ug/ml G418 for couple of passages.

[1238] To assay for neuronal activity, a 10 cm plate with cells around 70 to 80% confluent is screened by removing the old medium. Wash the cells once with PBS (Phosphate buffered saline). Then starve the cells in low serum medium (RPMI-1640 containing 1% horse serum and 0.5% FBS with antibiotics) overnight.

[1239] The next morning, remove the medium and wash the cells with PBS. Scrape off the cells from the plate, suspend the cells well in 2 ml low serum medium. Count the cell number and add more low serum medium to reach final cell density as 5×10⁵ cells/ml.

[1240] Add 200 ul of the cell suspension to each well of 96-well plate (equivalent to 1×10⁵ cells/well). Add 50 ul supernatant produced by Example 30, 37 degree C for 48 to 72 hr. As a positive control, a growth factor known to activate PC12 cells through EGR can be used, such as 50 ng/ul of Neuronal Growth Factor (NGF). Over fifty-fold induction of SEAP is typically seen in the positive control wells. SEAP assay the supernatant according to Example 36.

### Example 35

### High-throughput Screening Assay for T-cell Activity

[1241] NF-KB (Nuclear Factor KB) is a transcription factor activated by a wide variety of agents including the inflammatory cytokines IL-1 and TNF, CD30 and CD40, lymphotoxin-alpha and lymphotoxin-beta, by exposure to LPS or thrombin, and by expression of certain viral gene products. As a transcription factor, NF-KB regulates the expression of genes involved in immune cell activation, control of apoptosis (NF-KB appears to shield cells from apoptosis), B and T-cell development, anti-viral and antimicrobial responses, and multiple stress responses.

[1242] In non-stimulated conditions, NF-KB is retained in the cytoplasm with I-KB (Inhibitor KB). However, upon stimulation, I-KB is phosphorylated and degraded, causing NF-KB to shuttle to the nucleus, thereby activating transcription of target genes. Target genes activated by NF-KB include IL-2, IL-6, GM-CSF, ICAM-1 and class 1 MHC.

[1243] Due to its central role and ability to respond to a range of stimuli, reporter constructs utilizing the NF-KB promoter element are used to screen the supernatants produced in Example 30. Activators or inhibitors of NF-KB would be useful in treating, preventing, and/or diagnosing diseases. For example, inhibitors of NF-KB could be used to treat those diseases related to the acute or chronic activation of NF-KB, such as rheumatoid arthritis.

[1244] To construct a vector containing the NF-KB promoter element, a PCR based strategy is employed. The upstream primer contains four tandem copies of the NF-KB binding site (GGGGACTTTCCC) (SEQ ID NO: 8), 18 bp of sequence complementary to the 5′ end of the SV40 early promoter sequence, and is flanked with an XhoI site:

| | |
|---|---|
| 5′:GCGGCCTCGAGGGGACTTTCCCGGGGACTTTCCGGGGACTTTCCGGGAC | (SEQ ID NO: 9) |
| TTTCCATCCTGCCATCTCAATTAG:3′ | |

[1245] The downstream primer is complementary to the 3′ end of the SV40 promoter and is flanked with a Hind III site:

| | |
|---|---|
| 5′:GCGGCAAGCTTTTTGCAAAGCCTAGGC:3′ | (SEQ ID NO: 4) |

[1246] PCR amplification is performed using the SV40 promoter template present in the pB-gal:promoter plasmid obtained from Clontech. The resulting PCR fragment is digested with XhoI and Hind III and subcloned into BLSK2-. (Stratagene) Sequencing with the T7 and T3 primers confirms the insert contains the following sequence:

| | |
|---|---|
| 5′:CTCGAGGGGACTTTCCCGGGGACTTTCCGGGGACTTTCCGGGACTTTCC | (SEQ ID NO: 10) |
| ATCTGCCATCTCAATTAGTCAGCAACCATAGTCCCGCCCCTAACTCCGCCC | |
| ATCCCGCCCCTAACTCCGCCCAGTTCCGCCCATTCTCCGCCCCATGGCTGA | |
| CTAATTTTTTTTATTTATGCAGAGGCCGAGGCCGCCTCGGCCTCTGAGCTAT | |
| TCCAGAAGTAGTGAGGAGGCTTTTTTGGAGGCCTAGGCTTTTGCAAAAAGC | |
| TT:3′ | |

[1247] Next, replace the SV40 minimal promoter element present in the pSEAP2-promoter plasmid (Clontech) with this NF-KB/SV40 fragment using XhoI and HindIII. However, this vector does not contain a neomycin resistance gene, and therefore, is not preferred for mammalian expression systems.

[1248] In order to generate stable mammalian cell lines, the NF-KB/SV40/SEAP cassette is removed from the above NF-KB/SEAP vector using restriction enzymes SalI and NotI, and inserted into a vector containing neomycin resistance. Particularly, the NF-KB/SV40/SEAP cassette was inserted into pGFP-1 (Clontech), replacing the GFP gene, after restricting pGFP-1 with SalI and NotI.

[1249] Once NF-KB/SV40/SEAP/Neo vector is created, stable Jurkat T-cells are created and maintained according to the protocol described in Example 32. Similarly, the method for assaying supernatants with these stable Jurkat T-cells is also described in Example 32. As a positive control, exogenous TNF alpha (0.1,1, 10 ng) is added to wells H9, H10, and H11, with a 5-10 fold activation typically observed.

### Example 36

### Assay for SEAP Activity

[1250] As a reporter molecule for the assays described in Examples 32-35, SEAP activity is assayed using the Tropix Phospho-light Kit (Cat. BP-400) according to the following general procedure. The Tropix Phospho-light Kit supplies the Dilution, Assay, and Reaction Buffers used below.

[1251] Prime a dispenser with the 2.5× Dilution Buffer and dispense 15 ul of 2.5× dilution buffer into Optiplates containing 35 ul of a supernatant. Seal the plates with a plastic sealer and incubate at 65 degree C for 30 min. Separate the Optiplates to avoid uneven heating.

[1252] Cool the samples to room temperature for 15 minutes. Empty the dispenser and prime with the Assay Buffer. Add 50 ml Assay Buffer and incubate at room temperature 5 min. Empty the dispenser and prime with the Reaction Buffer (see the Table below). Add 50 ul Reaction Buffer and incubate at room temperature for 20 minutes. Since the intensity of the chemiluminescent signal is time dependent, and it takes about 10 minutes to read 5 plates on a luminometer, thus one should treat 5 plates at each time and start the second set 10 minutes later.

[1253] Read the relative light unit in the luminometer. Set H12 as blank, and print the results. An increase in chemiluminescence indicates reporter activity.

Reaction Buffer Formulation:

| # of plates | Rxn buffer diluent (ml) | CSPD (ml) |
|---|---|---|
| 10 | 60 | 3 |
| 11 | 65 | 3.25 |
| 12 | 70 | 3.5 |
| 13 | 75 | 3.75 |
| 14 | 80 | 4 |
| 15 | 85 | 4.25 |
| 16 | 90 | 4.5 |
| 17 | 95 | 4.75 |
| 18 | 100 | 5 |
| 19 | 105 | 5.25 |
| 20 | 110 | 5.5 |
| 21 | 115 | 5.75 |
| 22 | 120 | 6 |
| 23 | 125 | 6.25 |
| 24 | 130 | 6.5 |
| 25 | 135 | 6.75 |
| 26 | 140 | 7 |
| 27 | 145 | 7.25 |
| 28 | 150 | 7.5 |
| 29 | 155 | 7.75 |
| 30 | 160 | 8 |
| 31 | 165 | 8.25 |
| 32 | 170 | 8.5 |
| 33 | 175 | 8.75 |
| 34 | 180 | 9 |
| 35 | 185 | 9.25 |
| 36 | 190 | 9.5 |
| 37 | 195 | 9.75 |
| 38 | 200 | 10 |
| 39 | 205 | 10.25 |
| 40 | 210 | 10.5 |
| 41 | 215 | 10.75 |
| 42 | 220 | 11 |
| 43 | 225 | 11.25 |
| 44 | 230 | 11.5 |
| 45 | 235 | 11.75 |
| 46 | 240 | 12 |
| 47 | 245 | 12.25 |
| 48 | 250 | 12.5 |
| 49 | 255 | 12.75 |
| 50 | 260 | 13 |

### Example 37

### High-Throughput Screening Assay Identifying Changes in Small Molecule Concentration and Membrane Permeability

[1254] Binding of a ligand to a receptor is known to alter intracellular levels of small molecules, such as calcium, potassium, sodium, and pH, as well as alter membrane potential. These alterations can be measured in an assay to identify supernatants which bind to receptors of a particular cell. Although the following protocol describes an assay for calcium, this protocol can easily be modified to detect changes in potassium, sodium, pH, membrane potential, or any other small molecule which is detectable by a fluorescent probe.

[1255] The following assay uses Fluorometric Imaging Plate Reader (“FLIPR”) to measure changes in fluorescent molecules (Molecular Probes) that bind small molecules. Clearly, any fluorescent molecule detecting a small molecule can be used instead of the calcium fluorescent molecule, fluo-4 (Molecular Probes, Inc.; catalog no. F-14202), used here.

[1256] For adherent cells, seed the cells at 10,000-20,000 cells/well in a Co-star black 96-well plate with clear bottom. The plate is incubated in a CO₂ incubator for 20 hours. The adherent cells are washed two times in Biotek washer with 200 ul of HBSS (Hank's Balanced Salt Solution) leaving 100 ul of buffer after the final wash.

[1257] A stock solution of 1 mg/ml fluo-4 is made in 10% pluronic acid DMSO. To load the cells with fluo-4, 50 ul of 12 ug/mi fluo-4 is added to each well. The plate is incubated at 37 degrees C in a CO₂ incubator for 60 min. The plate is washed four times in the Biotek washer with HBSS leaving 100 ul of buffer.

[1258] For non-adherent cells, the cells are spun down from culture media. Cells are re-suspended to 2-5×10⁶ cells/ml with HBSS in a 50-ml conical tube. 4 ul of 1 mg/ml fluo-4 solution in 10% pluronic acid DMSO is added to each ml of cell suspension. The tube is then placed in a 37 degrees C water bath for 30-60 min. The cells are washed twice with HBSS, resuspended to 1×10⁶ cells/ml, and dispensed into a microplate, 100 ul/well. The plate is centrifuged at 1000 rpm for 5 min. The plate is then washed once in Denley Cell Wash with 200 ul, followed by an aspiration step to 100 ul final volume.

[1259] For a non-cell based assay, each well contains a fluorescent molecule, such as fluo-4. The supernatant is added to the well, and a change in fluorescence is detected.

[1260] To measure the fluorescence of intracellular calcium, the FLIPR is set for the following parameters: (1) System gain is 300-800 mW; (2) Exposure time is 0.4 second; (3) Camera F/stop is F/2; (4) Excitation is 488 nm; (5) Emission is 530 nm; and (6) Sample addition is 50 ul. Increased emission at 530 nm indicates an extracellular signaling event caused by the a molecule, either polypeptide of the present invention or a molecule induced by polypeptide of the present invention, which has resulted in an increase in the intracellular Ca⁺⁺ concentration.

### Example 38

### High-throughput Screening Assay Identifying Tyrosine Kinase Activity

[1261] The Protein Tyrosine Kinases (PTK) represent a diverse group of transmembrane and cytoplasmic kinases. Within the Receptor Protein Tyrosine Kinase RPTK) group are receptors for a range of mitogenic and metabolic growth factors including the PDGF, FGF, EGF, NGF, HGF and Insulin receptor subfamilies. In addition there are a large family of RPTKs for which the corresponding ligand is unknown. Ligands for RPTKs include mainly secreted small proteins, but also membrane-bound and extracellular matrix proteins.

[1262] Activation of RPTK by ligands involves ligand-mediated receptor dimerization, resulting in transphosphorylation of the receptor subunits and activation of the cytoplasmic tyrosine kinases. The cytoplasmic tyrosine kinases include receptor associated tyrosine kinases of the src-family (e.g., src, yes, Ick, lyn, fyn) and non-receptor linked and cytosolic protein tyrosine kinases, such as the Jak family, members of which mediate signal transduction triggered by the cytokine superfamily of receptors (e.g., the Interleukins, Interferons, GM-CSF, and Leptin).

[1263] Because of the wide range of known factors capable of stimulating tyrosine kinase activity, identifying whether polypeptide of the present invention or a molecule induced by polypeptide of the present invention is capable of activating tyrosine kinase signal transduction pathways is of interest. Therefore, the following protocol is designed to identify such molecules capable of activating the tyrosine kinase signal transduction pathways.

[1264] Seed target cells (e.g., primary keratinocytes) at a density of approximately 25,000 cells per well in a 96 well Loprodyne Silent Screen Plates purchased from Nalge Nunc (Naperville, Ill.). The plates are sterilized with two 30 minute rinses with 100% ethanol, rinsed with water and dried overnight. Some plates are coated for 2 hr with 100 ml of cell culture grade type I collagen (50 mg/ml), gelatin (2%) or polylysine (50 mg/ml), all of which can be purchased from Sigma Chemicals (St. Louis, Mo.) or 10% Matrigel purchased from Becton Dickinson (Bedford, Mass.), or calf serum, rinsed with PBS and stored at 4 degree C. Cell growth on these plates is assayed by seeding 5,000 cells/well in growth medium and indirect quantitation of cell number through use of alamarBlue as described by the manufacturer Alamar Biosciences, Inc. (Sacramento, Calif.) after 48 hr. Falcon plate covers #3071 from Becton Dickinson (Bedford, Mass.) are used to cover the Loprodyne Silent Screen Plates. Falcon Microtest III cell culture plates can also be used in some proliferation experiments.

[1265] To prepare extracts, A431 cells are seeded onto the nylon membranes of Loprodyne plates (20,000/200ml/well) and cultured overnight in complete medium. Cells are quiesced by incubation in serum-free basal medium for 24 hr. After 5-20 minutes treatment with EGF (60 ng/ml) or 50 ul of the supernatant produced in Example 30, the medium was removed and 100 ml of extraction buffer ((20 mM HEPES pH 7.5, 0.15 M NaCl, 1% Triton X-100, 0.1% SDS, 2 mM Na3VO4, 2 mM Na4P207 and a cocktail of protease inhibitors (# 1836170) obtained from Boeheringer Mannheim (Indianapolis, Ind.)) is added to each well and the plate is shaken on a rotating shaker for 5 minutes at 4° C. The plate is then placed in a vacuum transfer manifold and the extract filtered through the 0.45 mm membrane bottoms of each well using house vacuum. Extracts are collected in a 96-well catch/assay plate in the bottom of the vacuum manifold and immediately placed on ice. To obtain extracts clarified by centrifugation, the content of each well, after detergent solubilization for 5 minutes, is removed and centrifuged for 15 minutes at 4 degree C at 16,000× g.

[1266] Test the filtered extracts for levels of tyrosine kinase activity. Although many methods of detecting tyrosine kinase activity are known, one method is described here.

[1267] Generally, the tyrosine kinase activity of a supernatant is evaluated by determining its ability to phosphorylate a tyrosine residue on a specific substrate (a biotinylated peptide). Biotinylated peptides that can be used for this purpose include PSK1 (corresponding to amino acids 6-20 of the cell division kinase cdc2-p34) and PSK2 (corresponding to amino acids 1-17 of gastrin). Both peptides are substrates for a range of tyrosine kinases and are available from Boehringer Mannheim.

[1268] The tyrosine kinase reaction is set up by adding the following components in order. First, add 10 ul of 5 uM Biotinylated Peptide, then lOul ATPIMg₂₊ (5mM ATP/50 mM MgCl₂), then 10 ul of 5× Assay Buffer (40 mM imidazole hydrochloride, pH7.3, 40 mM beta-glycerophosphate, 1 mM EGTA, 100 mM MgCl₂, 5 mM MnCl₂, 0.5 mg/ml BSA), then 5 ul of Sodium Vanadate (1 mM), and then 5 ul of water. Mix the components gently and preincubate the reaction mix at 30 degree C for 2 min. Initial the reaction by adding 10 ul of the control enzyme or the filtered supematant.

[1269] The tyrosine kinase assay reaction is then terminated by adding 10 ul of 120 mm EDTA and place the reactions on ice.

[1270] Tyrosine kinase activity is determined by transferring 50 ul aliquot of reaction mixture to a microtiter plate (MTP) module and incubating at 37 degree C for 20 min. This allows the streptavidin coated 96 well plate to associate with the biotinylated peptide. Wash the MTP module with 300 ul/well of PBS four times. Next add 75 ul of anti-phospotyrosine antibody conjugated to horse radish peroxidase (anti-P-Tyr-POD(0.5 u/ml)) to each well and incubate at 37 degree C for one hour. Wash the well as above.

[1271] Next add 100 ul of peroxidase substrate solution (Boehringer Mannheim) and incubate at room temperature for at least 5 mins (up to 30 mm). Measure the absorbance of the sample at 405 nm by using ELISA reader. The level of bound peroxidase activity is quantitated using an ELISA reader and reflects the level of tyrosine kinase activity.

### Example 39

### High-throughput Screening Assay Identifying Phosphorylation Activity

[1272] As a potential alternative and/or complement to the assay of protein tyrosine kinase activity described in Example 38, an assay which detects activation (phosphorylation) of major intracellular signal transduction intermediates can also be used. For example, as described below one particular assay can detect tyrosine phosphorylation of the Erk-1 and Erk-2 kinases. However, phosphorylation of other molecules, such as Raf, JNK, p38 MAP, Map kinase kinase (MEK), MEK kinase, Src, Muscle specific kinase (MuSK), IRAK, Tec, and Janus, as well as any other phosphoserine, phosphotyrosine, or phosphothreonine molecule, can be detected by substituting these molecules for Erk-1 or Erk-2 in the following assay.

[1273] Specifically, assay plates are made by coating the wells of a 96-well ELISA plate with 0.1 ml of protein G (lug/ml) for 2 hr at room temp, (RT). The plates are then rinsed with PBS and blocked with 3-% BSA/PBS for 1 hr at RT. The protein G plates are then treated with 2 commercial monoclonal antibodies (100 ng/well) against Erk-1 and Erk-2 (1 hr at RT) (Santa Cruz Biotechnology). (To detect other molecules, this step can easily be modified by substituting a monoclonal antibody detecting any of the above described molecules.) After 3-5 rinses with PBS, the plates are stored at 4 degree C until use.

[1274] A431 cells are seeded at 20,000/well in a 96-well Loprodyne filterplate and cultured overnight in growth medium. The cells are then starved for 48 hr in basal medium (DMEM) and then treated with EGF (6ng/well) or 50 ul of the supernatants obtained in Example 30 for 5-20 minutes. The cells are then solubilized and extracts filtered directly into the assay plate.

[1275] After incubation with the extract for 1 hr at RT, the wells are again rinsed. As a positive control, a commercial preparation of MAP kinase (10 ng/well) is used in place of A431 extract. Plates are then treated with a commercial polyclonal (rabbit) antibody (lug/ml) which specifically recognizes the phosphorylated epitope of the Erk-1 and Erk-2 kinases (1 hr at RT). This antibody is biotinylated by standard procedures. The bound polyclonal antibody is then quantitated by successive incubations with Europium-streptavidin and Europium fluorescence enhancing reagent in the Wallac DELFIA instrument (time-resolved fluorescence). An increased fluorescent signal over background indicates a phosphorylation by polypeptide of the present invention or a molecule induced by polypeptide of the present invention.

### Example 40

### Assay for the Stimulation of Bone Marrow CD34+ Cell Proliferation

[1276] This assay is based on the ability of human CD34+ to proliferate in the presence of hematopoietic growth factors and evaluates the ability of isolated polypeptides expressed in mammalian cells to stimulate proliferation of CD34+ cells.

[1277] It has been previously shown that most mature precursors will respond to only a single signal. More immature precursors require at least two signals to respond. Therefore, to test the effect of polypeptides on hematopoietic activity of a wide range of progenitor cells, the assay contains a given polypeptide in the presence or absence of other hematopoietic growth factors. Isolated cells are cultured for 5 days in the presence of Stem Cell Factor (SCF) in combination with tested sample. SCF alone has a very limited effect on the proliferation of bone marrow (BM) cells, acting in such conditions only as a “survival” factor. However, combined with any factor exhibiting stimulatory effect on these cells (e.g., IL-3), SCF will cause a synergistic effect. Therefore, if the tested polypeptide has a stimulatory effect on hematopoietic progenitors, such activity can be easily detected. Since normal BM cells have a low level of cycling cells, it is likely that any inhibitory effect of a given polypeptide, or agonists or antagonists thereof, might not be detected. Accordingly, assays for an inhibitory effect on progenitors is preferably tested in cells that are first subjected to in vitro stimulation with SCF+IL+3, and then contacted with the compound that is being evaluated for inhibition of such induced proliferation.

[1278] Briefly, CD34+ cells are isolated using methods known in the art. The cells are thawed and resuspended in medium (QBSF 60 serum-free medium with 1% L-glutamine (500 ml) Quality Biological, Inc., Gaithersburg, MD Cat# 160-204-101). After several gentle centrifiugation steps at 200× g, cells are allowed to rest for one hour. The cell count is adjusted to 2.5×10⁵ cells/ml. During this time, 100 μl of sterile water is added to the peripheral wells of a 96-well plate. The cytokines that can be tested with a given polypeptide in this assay is rhSCF (R&D Systems, Minneapolis, MN, Cat# 255-SC) at 50 ng/ml alone and in combination with rhSCF and rhIL-3 (R&D Systems, Minneapolis, MN, Cat# 203-ML) at 30 ng/ml. After one hour, 10 μl of prepared cytokines, 50 μl of the supernatants prepared in Example 30 (supernatants at 1:2 dilution =50 μl) and 20 μl of diluted cells are added to the media which is already present in the wells to allow for a final total volume of 100 μl. The plates are then placed in a 37° C/5% CO₂ incubator for five days.

[1279] Eighteen hours before the assay is harvested, 0.5 μCi/well of [3H] Thymidine is added in a 10 μl volume to each well to determine the proliferation rate. The experiment is terminated by harvesting the cells from each 96-well plate to a filtermat using the Tomtec Harvester 96. After harvesting, the filtermats are dried, trimmed and placed into OmniFilter assemblies consisting of one OmniFilter plate and one OmniFilter Tray. 60 μl Microscint is added to each well and the plate sealed with TopSeal-A press-on sealing film A bar code 15 sticker is affixed to the first plate for counting. The sealed plates are then loaded and the level of radioactivity determined via the Packard Top Count and the printed data collected for analysis. The level of radioactivity reflects the amount of cell proliferation.

[1280] The studies described in this example test the activity of a given polypeptide to stimulate bone marrow CD34+ cell proliferation. One skilled in the art could easily modify the exemplified studies to test the activity of polynucleotides (e.g., gene therapy), antibodies, agonists, and/or antagonists and fragments and variants thereof. As a nonlimiting example, potential antagonists tested in this assay would be expected to inhibit cell proliferation in the presence of cytokines and/or to increase the inhibition of cell proliferation in the presence of cytokines and a given polypeptide. In contrast, potential agonists tested in this assay would be expected to enhance cell proliferation and/or to decrease the inhibition of cell proliferation in the presence of cytokines and a given polypeptide.

[1281] The ability of a gene to stimulate the proliferation of bone marrow CD34+ cells indicates that polynucleotides and polypeptides corresponding to the gene are useful for the diagnosis and treatment of disorders affecting the immune system and hematopoiesis. Representative uses are described in the “Immune Activity” and “Infectious Disease” sections above, and elsewhere herein.

### Example 41

### Assay for Extracellular Matrix Enhanced Cell Response (EMECR)

[1282] The objective of the Extracellular Matrix Enhanced Cell Response (EMECR) assay is to identify gene products (e.g., isolated polypeptides) that act on the hematopoietic stem cells in the context of the extracellular matrix (ECM) induced signal.

[1283] Cells respond to the regulatory factors in the context of signal(s) received from the surrounding microenvironment. For example, fibroblasts, and endothelial and epithelial stem cells fail to replicate in the absence of signals from the ECM. Hematopoietic stem cells can undergo self-renewal in the bone marrow, but not in in vitro suspension culture. The ability of stem cells to undergo self-renewal in vitro is dependent upon their interaction with the stromal cells and the ECM protein fibronectin (fn). Adhesion of cells to fn is mediated by the α₅.β₁ and α₄.β₁ integrin receptors, which are expressed by human and mouse hematopoietic stem cells. The factor(s) which integrate with the ECM environment and are responsible for stimulating stem cell self-renewal have not yet been identified. Discovery of such factors should be of great interest in gene therapy and bone marrow transplant applications

[1284] Briefly, polystyrene, non tissue culture treated, 96-well plates are coated with fn fragment at a coating concentration of 0.2 μg/cm². Mouse bone marrow cells are plated (1,000 cells/well ) in 0.2 ml of serum-free medium. Cells cultured in the presence of IL-3 (5 ng/ml )+SCF (50 ng/ml ) would serve as the positive control, conditions under which little self-renewal but pronounced differentiation of the stem cells is to be expected. Gene products of the invention (e.g., including, but not limited to, polynucleotides and polypeptides of the present invention, and supernatants produced in Example 30), are tested with appropriate negative controls in the presence and absence of SCF(5.0 ng/ml), where test factor supernatants represent 10% of the total assay volume. The plated cells are then allowed to grow by incubating in a low oxygen environment (5% CO₂, 7% O₂, and 88% N₂) tissue culture incubator for 7 days. The number of proliferating cells within the wells is then quantitated by measuring thymidine incorporation into cellular DNA. Verification of the positive hits in the assay will require phenotypic characterization of the cells, which can be accomplished by scaling up of the culture system and using appropriate antibody reagents against cell surface antigens and FACScan.

[1285] One skilled in the art could easily modify the exemplified studies to test the activity of polynucleotides (e.g., gene therapy), antibodies, agonists, and/or antagonists and fragments and variants thereof.

[1286] If a particular polypeptide of the present invention is found to be a stimulator of hematopoietic progenitors, polynucleotides and polypeptides corresponding to the gene encoding said polypeptide may be useful for the diagnosis and treatment of disorders affecting the immune system and hematopoiesis. Representative uses are described in the “Immune Activity” and “Infectious Disease” sections above, and elsewhere herein. The gene product may also be useful in the expansion of stem cells and committed progenitors of various blood lineages, and in the differentiation and/or proliferation of various cell types.

[1287] Additionally, the polynucleotides and/or polypeptides of the gene of interest and/or agonists and/or antagonists thereof, may also be employed to inhibit the proliferation and differentiation of hematopoietic cells and therefore may be employed to protect bone marrow stem cells from chemotherapeutic agents during chemotherapy. This antiproliferative effect may allow administration of higher doses of chemotherapeutic agents and, therefore, more effective chemotherapeutic treatment.

[1288] Moreover, polynucleotides and polypeptides corresponding to the gene of interest may also be useful for the treatment and diagnosis of hematopoietic related disorders such as, for example, anemia, pancytopenia, leukopenia, thrombocytopenia or leukemia since stromal cells are important in the production of cells of hematopoietic lineages. The uses include bone marrow cell ex-vivo culture, bone marrow transplantation, bone marrow reconstitution, radiotherapy or chemotherapy of neoplasia.

### Example 42

### Human Dermal Fibroblast and Aortic Smooth Muscle Cell Proliferation

[1289] The polypeptide of interest is added to cultures of normal human dermal fibroblasts (NHDF) and human aortic smooth muscle cells (AoSMC) and two co-assays are performed with each sample. The first assay examines the effect of the polypeptide of interest on the proliferation of normal human dermal fibroblasts (NHDF) or aortic smooth muscle cells (AoSMC). Aberrant growth of fibroblasts or smooth muscle cells is a part of several pathological processes, including fibrosis, and restenosis. The second assay examines IL6 production by both NHDF and SMC. IL6 production is an indication of functional activation. Activated cells will have increased production of a number of cytokines and other factors, which can result in a proinflammatory or immunomodulatory outcome. Assays are run with and without co-TNFa stimulation, in order to check for costimulatory or inhibitory activity.

[1290] Briefly, on day 1, 96-well black plates are set up with 1000 cells/well (NHDF) or 2000 cells/well (AoSMC) in 100 μl culture media. NHDF culture media contains: Clonetics FB basal media, Img/ml hFGF, 5 mg/ml insulin, 50 mg/ml gentamycin, 2%FBS, while AoSMC culture media contains Clonetics SM basal media, 0.5 μg/ml hEGF, 5 mg/ml insulin, 1 μg/ml hFGF, 50 mg/ml gentamycin, 50 μg/ml Amphotericin B, 5%FBS. After incubation at 37° C. for at least 4-5 hours culture media is aspirated and replaced with growth arrest media. Growth arrest media for NHDF contains fibroblast basal media, 50 mg/ml gentamycin, 2% FBS, while growth arrest media for AoSMC contains SM basal media, 50 mg/ml gentamycin, 50 μg/ml Amphotericin B, 0.4% FBS. Incubate at 37° C. until day 2.

[1291] On day 2, serial dilutions and templates of the polypeptide of interest are designed such that they always include media controls and known-protein controls. For both stimulation and inhibition experiments, proteins are diluted in growth arrest media. For inhibition experiments, TNFa is added to a final concentration of 2 ng/ml (NHDF) or 5 ng/ml (AoSMC). Add 1/3 vol media containing controls or polypeptides of the present invention and incubate at 37 degrees C/5% CO₂ until day 5.

[1292] Transfer 60 μl from each well to another labeled 96-well plate, cover with a plate-sealer, and store at 4 degrees C until Day 6 (for IL6 ELISA). To the remaining 100 μl in the cell culture plate, aseptically add Alamar Blue in an amount equal to 10% of the culture volume (10 μl). Return plates to incubator for 3 to 4 hours. Then measure fluorescence with excitation at 530 nm and emission at 590 nm using the CytoFluor. This yields the growth stimulationlinhibition data.

[1293] On day 5, the IL6 ELISA is performed by coating a 96 well plate with 50-100 ul/well of Anti-Human IL6 Monoclonal antibody diluted in PBS, pH 7.4, incubate ON at room temperature.

[1294] On day 6, empty the plates into the sink and blot on paper towels. Prepare Assay Buffer containing PBS with 4% BSA. Block the plates with 200 μl/well of Pierce Super Block blocking buffer in PBS for 1-2 hr and then wash plates with wash buffer (PBS, 0.05% Tween-20). Blot plates on paper towels. Then add 50 μl/well of diluted Anti-Human IL-6 Monoclonal, Biotin-labeled antibody at 0.50 mg/ml. Make dilutions of IL-6 stock in media (30, 10, 3, 1, 0.3, 0 ng/ml). Add duplicate samples to top row of plate. Cover the plates and incubate for 2 hours at RT on shaker.

[1295] Plates are washed with wash buffer and blotted on paper towels. Dilute EU-labeled Streptavidin 1:1000 in Assay buffer, and add 100 μl/well. Cover the plate and incubate 1 h at RT. Plates are again washed with wash buffer and blotted on paper towels.

[1296] Add 100 μl/well of Enhancement Solution. Shake for 5 minutes. Read the plate on the Wallac DELFIA Fluorometer. Readings from triplicate samples in each assay were tabulated and averaged.

[1297] A positive result in this assay suggests AoSMC cell proliferation and that the polypeptide of the present invention may be involved in dermal fibroblast proliferation and/or smooth muscle cell proliferation. A positive result also suggests many potential uses of polypeptides, polynucleotides, agonists and/or antagonists of the polynucleotide/polypeptide of the present invention which gives a positive result. For example, inflammation and immune responses, wound healing, and angiogenesis, as detailed throughout this specification. Particularly, polypeptides of the present invention and polynucleotides of the present invention may be used in wound healing and dermal regeneration, as well as the promotion of vasculogenesis, both of the blood vessels and lymphatics. The growth of vessels can be used in the treatment of, for example, cardiovascular diseases. Additionally, antagonists of polypeptides and polynucleotides of the invention may be useful in treating diseases, disorders, and/or conditions which involve angiogenesis by acting as an anti-vascular agent (e.g., anti-angiogenesis). These diseases, disorders, and/or conditions are known in the art and/or are described herein, such as, for example, malignancies, solid tumors, benign tumors, for example hemangiomas, acoustic neuromas, neurofibromas, trachomas, and pyogenic granulomas; artheroscleric plaques; ocular angiogenic diseases, for example, diabetic retinopathy, retinopathy of prematurity, macular degeneration, corneal graft rejection, neovascular glaucoma, retrolental fibroplasia, rubeosis, retinoblastoma, uvietis and Pterygia (abnormal blood vessel growth) of the eye; rheumatoid arthritis; psoriasis; delayed wound healing; endometriosis; vasculogenesis; granulations; hypertrophic scars (keloids); nonunion fractures; scleroderma; trachoma; vascular adhesions; myocardial angiogenesis; coronary collaterals; cerebral collaterals; arteriovenous malformations; ischemic limb angiogenesis; Osler-Webber Syndrome; plaque neovascularization; telangiectasia; hemophiliac joints; angiofibroma; fibromuscular dysplasia; wound granulation; Crohn's disease; and atherosclerosis. Moreover, antagonists of polypeptides and polynucleotides of the invention may be useful in treating anti-hyperproliferative diseases and/or anti-inflammatory known in the art and/or described herein.

[1298] One skilled in the art could easily modify the exemplified studies to test the activity of polynucleotides (e.g., gene therapy), antibodies, agonists, and/or antagonists and fragments and variants thereof.

### Example 43

### Cellular Adhesion Molecule (CAM) Expression on Endothelial Cells

[1299] The recruitment of lymphocytes to areas of inflammation and angio genesis involves specific receptor-ligand interactions between cell surface adhesion molecules (CAMs) on lymphocytes and the vascular endothelium. The adhesion process, in both normal and pathological settings, follows a multi-step cascade that involves intercellular adhesion molecule-1 (ICAM-1), vascular cell adhesion molecule-1 (VCAM-1), and endothelial leukocyte adhesion molecule-1 (E-selectin) expression on endothelial cells (EC). The expression of these molecules and others on the vascular endothelium determines the efficiency with which leukocytes may adhere to the local vasculature and extravasate into the local tissue during the development of an inflammatory response. The local concentration of cytokines and growth factor participate in the modulation of the expression of these CAMs.

[1300] Briefly, endothelial cells (e.g., Human Umbilical Vein Endothelial cells (HUVECs)) are grown in a standard 96 well plate to confluence, growth medium is removed from the cells and replaced with 100 μl of 199 Medium (10% fetal bovine serum (FBS)). Samples for testing and positive or negative controls are added to the plate in triplicate (in 10 μl volumes). Plates are then incubated at 37° C. for either 5 h (selectin and integrin expression) or 24 h (integrin expression only). Plates are aspirated to remove medium and 100 μl of 0.1% paraformaldehyde-PBS(with Ca++ and Mg++) is added to each well. Plates are held at 4° C. for 30 min. Fixative is removed from the wells and wells are washed 1× with PBS(+Ca,Mg)+0.5% BSA and drained. 10 μl of diluted primary antibody is added to the test and control wells. Anti-ICAM-1-Biotin, Anti-VCAM-1-Biotin and Anti-E-selectin-Biotin are used at a concentration of 10 μg/ml (1:10 dilution of 0.1 mg/ml stock antibody). Cells are incubated at 37° C. for 30 min. in a humidified environment. Wells are washed three times with PBS(+Ca,Mg)+0.5% BSA. 20 μl of diluted ExtrAvidin-Alkaline Phosphatase (1:5,000 dilution, referred to herein as the working dilution) are added to each well and incubated at 37° C. for 30 min. Wells are washed three times with PBS(+Ca,Mg)+0.5% BSA. Dissolve 1 tablet of p-Nitrophenol Phosphate pNPP per 5 ml of glycine buffer (pH 10.4). 100 μl of pNPP substrate in glycine buffer is added to each test well. Standard wells in triplicate are prepared from the working dilution of the ExtrAvidin-Alkaline Phosphotase in glycine buffer: 1:5,000 (10°) >10^{-0.5}>10⁻¹>10^{-1.5}.5 μl of each dilution is added to triplicate wells and the resulting AP content in each well is 5.50 ng, 1.74 ng, 0.55 ng, 0.18 ng. 100 μl of pNNP reagent is then added to each of the standard wells. The plate is incubated at 37° C. for 4 h. A volume of 50 μl of 3M NaOH is added to all wells. The plate is read on a plate reader at 405 nm using the background subtraction option on blank wells filled with glycine buffer only. Additionally, the template is set up to indicate the concentration of AP-conjugate in each standard well [5.50 ng; 1.74 ng; 0.55 ng; 0.18 ng]. Results are indicated as amount of bound AP-conjugate in each sample.

### Example 44

### Alamar Blue Endothelial Cells Proliferation Assay

[1301] This assay may be used to quantitatively determine protein mediated inhibition of bFGF-induced proliferation of Bovine Lymphatic Endothelial Cells (LECs), Bovine Aortic Endothelial Cells (BAECs) or Human Microvascular Uterine Myometrial Cells (UTMECs). This assay incorporates a fluorometric growth indicator based on detection of metabolic activity. A standard Alamar Blue Proliferation Assay is prepared in EGM-2MV with 10 ng/ml of bFGF added as a source of endothelial cell stimulation. This assay may be used with a variety of endothelial cells with slight changes in growth medium and cell concentration. Dilutions of the protein batches to be tested are diluted as appropriate. Serum-free medium (GIBCO SFM) without bFGF is used as a non-stimulated control and Angiostatin or TSP-1 are included as a known inhibitory controls.

[1302] Briefly, LEC, BAECs or UTMECs are seeded in growth media at a density of 5000 to 2000 cells/well in a 96 well plate and placed at 37 degrees C overnight. After the overnight incubation of the cells, the growth media is removed and replaced with GIBCO EC-SFM. The cells are treated with the appropriate dilutions of the protein of interest or control protein sample(s) (prepared in SFM) in triplicate wells with additional bFGF to a concentration of 10 ng/ml. Once the cells have been treated with the samples, the plate(s) is/are placed back in the 37° C. incubator for three days. After three days 10 ml of stock alamar blue (Biosource Cat# DAL100) is added to each well and the plate(s) is/are placed back in the 37° C. incubator for four hours. The plate(s) are then read at 530 nm excitation and 590 nm emission using the CytoFluor fluorescence reader. Direct output is recorded in relative fluorescence units.

[1303] Alamar blue is an oxidation-reduction indicator that both fluoresces and changes color in response to chemical reduction of growth medium resulting from cell growth. As cells grow in culture, innate metabolic activity results in a chemical reduction of the immediate surrounding environment. Reduction related to growth causes the indicator to change from oxidized (non-fluorescent blue) form to reduced (fluorescent red) form (i.e., stimulated proliferation will produce a stronger signal and inhibited proliferation will produce a weaker signal and the total signal is proportional to the total number of cells as well as their metabolic activity). The background level of activity is observed with the starvation medium alone. This is compared to the output observed from the positive control samples (bFGF in growth medium) and protein dilutions.

### Example 45

### Detection oflnhibition of a Mixed Lymphocyte Reaction

[1304] This assay can be used to detect and evaluate inhibition of a Mixed Lymphocyte Reaction (MLR) by gene products (e.g., isolated polypeptides). Inhibition of a MLR may be due to a direct effect on cell proliferation and viability, modulation of costimulatory molecules on interacting cells, modulation of adhesiveness between lymphocytes and accessory cells, or modulation of cytokine production by accessory cells. Multiple cells may be targeted by these polypeptides since the peripheral blood mononuclear fraction used in this assay includes T, B and natural killer lymphocytes, as well as monocytes and dendritic cells.

[1305] Polypeptides of interest found to inhibit the MLR may find application in diseases associated with lymphocyte and monocyte activation or proliferation. These include, but are not limited to, diseases such as asthma, arthritis, diabetes, inflammatory skin conditions, psoriasis, eczema, systemic lupus erythematosus, multiple sclerosis, glomerulonephritis, inflammatory bowel disease, crohn's disease, ulcerative colitis, arteriosclerosis, cirrhosis, graft vs. host disease, host vs. graft disease, hepatitis, leukemia and lymphoma.

[1306] Briefly, PBMCs from human donors are purified by density gradient centrifugation using Lymphocyte Separation Medium (LSM®, density 1.0770 g/ml, Organon Teknika Corporation, West Chester, Pa.). PBMCs from two donors are adjusted to 2×10⁶ cells/ml in RPMI-1640 (Life Technologies, Grand Island, N.Y.) supplemented with 10% FCS and 2 mM glutamine. PBMCs from a third donor is adjusted to 2×10⁵ cells/ml. Fifty microliters of PBMCs from each donor is added to wells of a 96-well round bottom microtiter plate. Dilutions of test materials (50 μl) is added in triplicate to microtiter wells. Test samples (of the protein of interest) are added for final dilution of 1:4; rhuIL-2 (R&D Systems, Minneapolis, MN, catalog number 202-IL) is added to a final concentration of 1 μg/ml; anti-CD4 mAb (R&D Systems, clone 34930.11, catalog number MAB379) is added to a final concentration of 10 μg/ml. Cells are cultured for 7-8 days at 37° C. in 5% CO₂, and 1 μC of [³H] thymidine is added to wells for the last 16 hrs of culture. Cells are harvested and thymidine incorporation determined using a Packard TopCount. Data is expressed as the mean and standard deviation of triplicate determinations.

[1307] Samples of the protein of interest are screened in separate experiments and compared to the negative control treatment, anti-CD4 mAb, which inhibits proliferation of lymphocytes and the positive control treatment, IL-2 (either as recombinant material or supernatant), which enhances proliferation of lymphocytes.

[1308] One skilled in the art could easily modify the exemplified studies to test the activity of polynucleotides (e.g., gene therapy), antibodies, agonists, and/or antagonists and fragments and variants thereof.

### Example 46

### Assays for Protease Activity

[1309] The following assay may be used to assess protease activity of the polypeptides of the invention.

[1310] Gelatin and casein zymography are performed essentially as described (Heusen et al., Anal. Biochem., 102:196-202 (1980); Wilson et al., Journal of Urology, 149:653-658 (1993)). Samples are run on 10% polyacryamide/0.1% SDS gels containing 1% gelain orcasein, soaked in 2.5% triton at room temperature for 1 hour, and in 0.1M glycine, pH 8.3 at 37° C. 5 to 16 hours. After staining in amido black areas of proteolysis apear as clear areas agains the blue-black background. Trypsin (Sigma T8642) is used as a positive control.

[1311] Protease activity is also determined by monitoring the cleavage of n-a-benzoyl-L-arginine ethyl ester (BAEE) (Sigma B-4500. Reactions are set up in (25 mMNaPO₄, 1 mM EDTA, and 1 mM BAEE), pH 7.5. Samples are added and the change in adsorbance at 260 nm is monitored on the Beckman DU-6 spectrophotometer in the time-drive mode. Trypsin is used as a positive control.

[1312] Additional assays based upon the release of acid-soluble peptides from casein or hemoglobin measured as adsorbance at 280 nm or colorimetrically using the Folin method are performed as described in Bergmeyer, et al., Methods of Enzymatic Analysis, 5 (1984). Other assays involve the solubilization of chromogenic substrates (Ward, Applied Science, 251-317 (1983).

### Example 47

### Identifying Serine Protease Substrate Specificity

[1313] Methods known in the art or described herein may be used to determine the substrate specificity of the polypeptides of the present invention having serine protease activity. A preferred method of determining substrate specificity is by the use of positional scanning synthetic combinatorial libraries as described in GB 2 324 529 (incorporated herein in its entirety).

### Example 48

### Ligand Binding Assays

[1314] The following assay may be used to assess ligand binding activity of the polypeptides of the invention.

[1315] Ligand binding assays provide a direct method for ascertaining receptor pharmacology and are adaptable to a high throughput format. The purified ligand for a polypeptide is radiolabeled to high specific activity (50-2000 Ci/mmol) for binding studies. A determination is then made that the process of radiolabeling does not diminish the activity of the ligand towards its polypeptide. Assay conditions for buffers, ions, pH and other modulators such as nucleotides are optimized to establish a workable signal to noise ratio for both membrane and whole cell polypeptide sources. For these assays, specific polypeptide binding is defined as total associated radioactivity minus the radioactivity measured in the presence of an excess of unlabeled competing ligand. Where possible, more than one competing ligand is used to define residual nonspecific binding.

### Example 49

### Functional Assay in Xenopus Oocytes

[1316] Capped RNA transcripts from linearized plasmid templates encoding the polypeptides of the invention are synthesized in vitro with RNA polymerases in accordance with standard procedures. In vitro transcripts are suspended in water at a final concentration of 0.2 mg/mi. Ovarian lobes are removed from adult female toads, Stage V defolliculated oocytes are obtained, and RNA transcripts (10 ng/oocytc) are injected in a 50 nl bolus using a microinjection apparatus. Two electrode voltage clamps are used to measure the currents from individual Xenopus oocytes in response polypeptides and polypeptide agonist exposure. Recordings are made in Ca2+ free Barth's medium at room temperature. The Xenopus system can be used to screen known ligands and tissue/cell extracts for activating ligands.

### Example 50

### Microphysiometric Assays

[1317] Activation of a wide variety of secondary messenger systems results in extrusion of small amounts of acid from a cell. The acid formed is largely as a result of the increased metabolic activity required to fuel the intracellular signaling process. The pH changes in the media surrounding the cell are very small but are detectable by the CYTOSENSOR microphysiometer (Molecular Devices Ltd., Menlo Park, Calif.). The CYTOSENSOR is thus capable of detecting the activation of polypeptide which is coupled to an energy utilizing intracellular signaling pathway.

### Example 51

### Extract/Cell Supernatant Screening

[1318] A large number of mammalian receptors exist for which there remains, as yet, no cognate activating ligand (agonist). Thus, active ligands for these receptors may not be included within the ligands banks as identified to date. Accordingly, the polypeptides of the invention can also be functionally screened (using calcium, cAMP, microphysiometer, oocyte electrophysiology, etc., functional screens) against tissue extracts to identify its natural ligands. Extracts that produce positive functional responses can be sequentially subfractionated until an activating ligand is isolated and identified.

### Example 52

### Calcium and cAMP Functional Assays

[1319] Seven transmembrane receptors which are expressed in HEK 293 cells have been shown to be coupled functionally to activation of PLC and calcium mobilization and/or cAMP stimulation or inhibition. Basal calcium levels in the HEK 293 cells in receptor-transfected or vector control cells were observed to be in the normal, 100 nM to 200 nM, range. HEK 293 cells expressing recombinant receptors are loaded with flira 2 and in a single day >150 selected ligands or tissue/cell extracts are evaluated for agonist induced calcium mobilization. Similarly, HEK 293 cells expressing recombinant receptors are evaluated for the stimulation or inhibition of cAMP production using standard cAMP quantitation assays. Agonists presenting a calcium transient or cAMP fluctuation are tested in vector control cells to determine if the response is unique to the transfected cells expressing receptor.

### Example 53

### A TP-binding Assay

[1320] The following assay may be used to assess ATP-binding activity of polypeptides of the invention.

[1321] ATP-binding activity of the polypeptides of the invention may be detected using the ATP-binding assay described in U.S. Pat. No. 5,858,719, which is herein incorporated by reference in its entirety. Briefly, ATP-binding to polypeptides of the invention is measured via photoaffinity labeling with 8-azido-ATP in a competition assay. Reaction mixtures containing 1 mg/ml of the ABC transport protein of the present invention are incubated with varying concentrations of ATP, or the non-hydrolyzable ATP analog adenyl-5′-imidodiphosphate for 10 minutes at 4° C. A mixture of 8-azido-ATP (Sigma Chem. Corp., St. Louis, MO.) plus 8-azido-ATP (³²P-ATP) (5 mCi/Imol, ICN, Irvine Calif.) is added to a final concentration of 100 μM and 0.5 ml aliquots are placed in the wells of a porcelain spot plate on ice. The plate is irradiated using a short wave 254 nm UV lamp at a distance of 2.5 cm from the plate for two one-minute intervals with a one-minute cooling interval in between. The reaction is stopped by addition of dithiothreitol to a final concentration of 2 mM. The incubations are subjected to SDS-PAGE electrophoresis, dried, and autoradiographed. Protein bands corresponding to the particular polypeptides of the invention are excised, and the radioactivity quantified. A decrease in radioactivity with increasing ATP or adenly-5′-imidodiphosphate provides a measure of ATP affinity to the polypeptides.

### Example 54

### Small Molecule Screening

[1322] This invention is particularly useful for screening therapeutic compounds by using the polypeptides of the invention, or binding fragments thereof, in any of a variety of drug screening techniques. The polypeptide or fragment employed in such a test may be affixed to a solid support, expressed on a cell surface, free in solution, or located intracellularly. One method of drug screening utilizes eukaryotic or prokaryotic host cells which are stably transformed with recombinant nucleic acids expressing the polypeptide or fragment. Drugs are screened against such transformed cells in competitive binding assays. One may measure, for example, the formulation of complexes between the agent being tested and polypeptide of the invention.

[1323] Thus, the present invention provides methods of screening for drugs or any other agents which affect activities mediated by the polypeptides of the invention. These methods comprise contacting such an agent with a polypeptide of the invention or fragment thereof and assaying for the presence of a complex between the agent and the polypeptide or fragment thereof, by methods well known in the art. In such a competitive binding assay, the agents to screen are typically labeled. Following incubation, free agent is separated from that present in bound form, and the amount of free or uncomplexed label is a measure of the ability of a particular agent to bind to the polypeptides of the invention.

[1324] Another technique for drug screening provides high throughput screening for compounds having suitable binding affinity to the polypeptides of the invention, and is described in great detail in European Patent Application 84/03564, published on Sep. 13, 1984, which is herein incorporated by reference in its entirety. Briefly stated, large numbers of different small molecule test compounds are synthesized on a solid substrate, such as plastic pins or some other surface. The test compounds are reacted with polypeptides of the invention and washed. Bound polypeptides are then detected by methods well known in the art. Purified polypeptides are coated directly onto plates for use in the aforementioned drug screening techniques. In addition, non-neutralizing antibodies may be used to capture the peptide and immobilize it on the solid support.

[1325] This invention also contemplates the use of competitive drug screening assays in which neutralizing antibodies capable of binding polypeptides of the invention specifically compete with a test compound for binding to the polypeptides or fragments thereof. In-this manner, the antibodies are used to detect the presence of any peptide which shares one or more antigenic epitopes with a polypeptide of the invention.

### Example 55

### Phosphorylation Assay

[1326] In order to assay for phosphorylation activity of the polypeptides of the invention, a phosphorylation assay as described in U.S. Pat. No. 5,958,405 (which is herein incorporated by reference) is utilized. Briefly, phosphorylation activity may be measured by phosphorylation of a protein substrate using gamma-labeled ³²P-ATP and quantitation of the incorporated radioactivity using a gamma radioisotope counter. The polypeptides of the invention are incubated with the protein substrate, ³²P-ATP, and a kinase buffer. The 32p incorporated into the substrate is then separated from free ³²P-ATP by electrophoresis, and the incorporated ³²P is counted and compared to a negative control. Radioactivity counts above the negative control are indicative of phosphorylation activity of the polypeptides of the invention.

### Example 56

### Detection ofPhosphorylation Activity (Activation) of the Polypeptides of the Invention in the Presence of Polypeptide Ligands

[1327] Methods known in the art or described herein may be used to determine the phosphorylation activity of the polypeptides of the invention. A preferred method of determining phosphorylation activity is by the use of the tyrosine phosphorylation assay as described in U.S. Pat. No. 5,817,471 (incorporated herein by reference).

### Example 57

### Identification Of Signal Transduction Proteins that Interact with Polypeptides of the Present Invention

[1328] The purified polypeptides of the invention are research tools for the identification, characterization and purification of additional signal transduction pathway proteins or receptor proteins. Briefly, labeled receptor PTK polypeptide is useful as a reagent for the purification of molecules with which it interacts. In one embodiment of affinity purification, receptor PTK polypeptide is covalently coupled to a chromatography column. Cell-free extract derived from putative target cells, such as carcinoma tissues, is passed over the column, and molecules with appropriate affinity bind to the receptor PTK polypeptides, or specific phosphotyrosine-recognition domains thereof. The receptor PTK polypeptide interacting protein-complex is recovered from the column, dissociated, and the recovered molecule subjected to N-terminal protein sequencing. This amino acid sequence is then used to identify the captured molecule or to design degenerate oligonucleotide probes for cloning the relevant gene from an appropriate cDNA library.

### Example 58

### IL-6 Bioassay

[1329] To test the proliferative effects of the polypeptides of the invention, the IL-6 Bioassay as described by Marz et al. is utilized (Proc. Natl. Acad. Sci., U.S.A., 95:3251-56 (1998), which is herein incorporated by reference). Briefly, IL-6 dependent B9 murine cells are washed three times in IL-6 free medium and plated at a concentration of 5,000 cells per well in 50 μl, and 50 μI of the IL-6-like polypeptide is added. After 68 hrs. at 37° C., the number of viable cells is measured by adding the tetrazolium salt thiazolyl blue (MTT) and incubating for a further 4 hrs. at 37° C. B9 cells are lysed by SDS and optical density is measured at 570 nm. Controls containing IL-6 (positive) and no cytokine (negative) are utilized. Enhanced proliferation in the test sample(s) relative to the negative control is indicative of proliferative effects mediated by polypeptides of the invention.

### Example 59

### Support of Chicken Embryo Neuron Survival

[1330] To test whether sympathetic neuronal cell viability is supported by polypeptides of the invention, the chicken embryo neuronal survival assay of Senaldi et al is utilized (Proc. Natl. Acad. Sci., U.S.A., 96:11458-63 (1998), which is herein incorporated by reference). Briefly, motor and sympathetic neurons are isolated from chicken embryos, resuspended in L15 medium (with 10% FCS, glucose, sodium selenite, progesterone, conalbumin, putrescine, and insulin; Life Technologies, Rockville, MD.) and Dulbecco's modified Eagles medium [with 10% FCS, glutamine, penicillin, and 25 mM Hepes buffer (pH 7.2); Life Technologies, Rockville, Md.], respectively, and incubated at 37° C. in 5% CO₂ in the presence of different concentrations of the purified IL-6-like polypeptide, as well as a negative control lacking any cytokine. After 3 days, neuron survival is determined by evaluation of cellular morphology, and through the use of the calorimetric assay of Mosmann (Mossman, T., J. Immunol. Methods, 65:55-63 (1983)). Enhanced neuronal cell viability as compared to the controls lacking cytokine is indicative of the ability of the inventive purified IL-6-like polypeptide(s) to enhance the survival of neuronal cells.

### Example 60

### Assay for Phosphatase Activity

[1331] The following assay may be used to assess serine/threonine phosphatase (PTPase) activity of the polypeptides of the invention.

[1332] In order to assay for serine/threonine phosphatase (PTPase) activity, assays can be utilized which are widely known to those skilled in the art. For example, the serine/threonine phosphatase (PSPase) activity is measured using a PSPase assay kit from New England Biolabs, Inc. Myelin basic protein (MyBP), a substrate for PSPase, is phosphorylated on serine and threonine residues with cAMP-dependent Protein Kinase in the presence of [³²P]ATP. Protein serine/threonine phosphatase activity is then determined by measuring the release of inorganic phosphate from ³²P-labeled MyBP.

### Example 61

### Interaction of Serine/Threonine Phosphatases with Other Proteins

[1333] The polypeptides of the invention with serine/threonine phosphatase activity as determined in Example 60 are research tools for the identification, characterization and purification of additional interacting proteins or receptor proteins, or other signal transduction pathway proteins. Briefly, labeled polypeptide(s) of the invention is useful as a reagent for the purification of molecules with which it interacts. In one embodiment of affinity purification, polypeptide of the invention is covalently coupled to a chromatography column. Cell-free extract derived from putative target cells, such as neural or liver cells, is passed over the column, and molecules with appropriate affinity bind to the polypeptides of the invention. The polypeptides of the invention complex is recovered from the column, dissociated, and the recovered molecule subjected to N-terminal protein sequencing. This amino acid sequence is then used to identify the captured molecule or to design degenerate oligonucleotide probes for cloning the relevant gene from an appropriate cDNA library.

### Example 62

### Assaying for Heparanase Activity

[1334] In order to assay for heparanase activity of the polypeptides of the invention, the heparanase assay described by Vlodavsky et al is utilized (Vlodavsky, I., et al., Nat. Med., 5:793-802 (1999)). Briefly, cell lysates, conditioned media or intact cells (1×10⁶ cells per 35-mm dish) are incubated for 18 hrs at 37° C., pH 6.2-6.6, with ³⁵S-labeled ECM or soluble ECM derived peak I proteoglycans. The incubation medium is centrifuged and the supernatant is analyzed by gel filtration on a Sepharose CL-6B column (0.9×30 cm). Fractions are eluted with PBS and their radioactivity is measured. Degradation fragments of heparan sulfate side chains are eluted from Sepharose 6B at 0.5<Kₐᵥ<0.8 (peak II). Each experiment is done at least three times. Degradation fragments corresponding to “peak II,” as described by Vlodavsky et al., is indicative of the activity of the polypeptides of the invention in cleaving heparan sulfate.

### Example 63

### Immobilization of Biomolecules

[1335] This example provides a method for the stabilization of polypeptides of the invention in non-host cell lipid bilayer constucts (see, e.g., Bieri et al., Nature Biotech 17:1105-1108 (1999), hereby incorporated by reference in its entirety herein) which can be adapted for the study of polypeptides of the invention in the various functional assays described above. Briefly, carbohydrate-specific chemistry for biotinylation is used to confine a biotin tag to the extracellular domain of the polypeptides of the invention, thus allowing uniform orientation upon immobilization. A 50 uM solution of polypeptides of the invention in washed membranes is incubated with 20 mM NaIO4 and 1.5 mg/ml (4mM) BACH or 2 mg/ml (7.5mM) biotin-hydrazide for 1 hr at room temperature (reaction volume, 150 ul). Then the sample is dialyzed (Pierce Slidealizer Cassett, 10 kDa cutoff; Pierce Chemical Co., Rockford Ill.) at 4 C first for 5 h, exchanging the buffer after each hour, and finally for 12 h against 500 ml buffer R (0.15 M NaCI, 1 mM MgCl2, 10 mM sodium phosphate, pH7). Just before addition into a cuvette, the sample is diluted 1:5 in buffer ROG50 (Buffer R supplemented with 50 mM octylglucoside).

### Example 64

### TAQMAN

[1336] Quantitative PCR (QPCR). Total RNA from cells in culture are extracted by Trizol separation as recommended by the supplier (LifeTechnologies). (Total RNA is treated with DNase I (Life Technologies) to remove any contaminating genomic DNA before reverse transcription.) Total RNA (50 ng) is used in a one-step, 50ul, RT-QPCR, consisting of Taqman Buffer A (Perkin-Elmer; 50 mM KCl/10 mM Tris, pH 8.3), 5.5 mM MgCl₂, 240 μM each dNTP, 0.4 units RNase inhibitor(Promega), 8%glycerol, 0.012% Tween-20, 0.05% gelatin, 0.3uM primers, O.luM probe, 0.025units Amplitaq Gold (Perkin-Elmer) and 2.5 units Superscript II reverse transcriptase (Life Technologies). As a control for genomic contamination, parallel reactions are setup without reverse transcriptase. The relative abundance of (unknown) and 18S RNAs are assessed by using the Applied Biosystems Prism 7700 Sequence Detection System (Livak, K. J., Flood, S. J., Marmaro, J., Giusti, W. & Deetz, K. (1995) PCR Methods Appl. 4, 357-362). Reactions are carried out at 48° C. for 30 min, 95° C. for 10 min, followed by 40 cycles of 95° C. for 15s, 60° C. for 1 min. Reactions are performed in triplicate.

[1337] Primers (f & r) and FRET probes sets are designed using Primer Express Software (Perkin-Elmer). Probes are labeled at the 5′-end with the reporter dye 6-FAM and on the 3′-end with the quencher dye TAMRA (Biosource International, Camarillo, Calif. or Perkin-Elmer).

### Example 65

### Assays for Metalloproteinase Activity

[1338] Metalloproteinases (EC 3.4.24.-) are peptide hydrolases which use metal ions, such as Zn²⁺, as the catalytic mechanism. Metalloproteinase activity of polypeptides of the present invention can be assayed according to the following methods.

[1339] Proteolysis of Alpha-2-macroglobulin

[1340] To confirm protease activity, purified polypeptides of the invention are mixed with the substrate alpha-2-macroglobulin (0.2 unit/ml; Boehringer Mannheim, Germany) in 1× assay buffer (50 mM HEPES, pH 7.5, 0.2 M NaCl, 10 mM CaCl₂, 25 μM ZnCl₂ and 0.05% Brij-35) and incubated at 37° C. for 1-5 days. Trypsin is used as positive control. Negative controls contain only alpha-2-macroglobulin in assay buffer. The samples are collected and boiled in SDS-PAGE sample buffer containing 5% 2-mercaptoethanol for 5-min, then loaded onto 8% SDS-polyacrylamide gel. After electrophoresis the proteins are visualized by silver staining. Proteolysis is evident by the appearance of lower molecular weight bands as compared to the negative control.

[1341] Inhibition of Alpha-2-macroglobulin Proteolysis by Inhibitors of Metalloproteinases

[1342] Known metalloproteinase inhibitors (metal chelators (EDTA, EGTA, AND HgCI₂), peptide metalloproteinase inhibitors (TIMP-1 and TIMP-2), and commercial small molecule MMP inhibitors) are used to characterize the proteolytic activity of polypeptides of the invention. The three synthetic MMP inhibitors used are: MMP inhibitor I, [IC₅₀=1.0 μM against MMP-1 and MMP-8; IC₅₀=30 μM against MMP-9; IC₅₀=150 μM against MMP-3]; MMP-3 (stromelysin-1) inhibitor I [IC₅₀=5 μM against MMP-3], and MMP-3 inhibitor II [Kᵢ=130 nM against MMP-3]; inhibitors available through Calbiochem, catalog # 444250, 444218, and 444225, respectively). Briefly, different concentrations of the small molecule MMP inhibitors are mixed with purified polypeptides of the invention (50μg/ml) in 22.9 ul of 1× HEPES buffer (50 mM HEPES, pH 7.5, 0.2 M NaCl, 10 mM CaCl₂, 25 μM ZnCl₂ and 0.05%Brij-35) and incubated at room temperature (24° C.) for 2-hr, then 7.1 μl of substrate alpha-2-macroglobulin (0.2 unit/ml) is added and incubated at 37° C. for 20-hr. The reactions are stopped by adding 4× sample buffer and boiled immediately for 5 minutes. After SDS-PAGE, the protein bands are visualized by silver stain.

[1343] Synthetic Fluorogenic Peptide Substrates Cleavage Assay

[1344] The substrate specificity for polypeptides of the invention with demonstrated metalloproteinase activity can be determined using synthetic fluorogenic peptide substrates (purchased from BACHEM Bioscience Inc). Test substrates include, M-1985, M-2225, M-2105, M-2110, and M-2255. The first four are MMP substrates and the last one is a substrate of tumor necrosis factor-α (TNF-α) converting enzyme (TACE). All the substrates are prepared in 1:1 dimethyl sulfoxide (DMSO) and water. The stock solutions are 50-500 μM. Fluorescent assays are performed by using a Perkin Elmer LS 50B luminescence spectrometer equipped with a constant temperature water bath. The excitation λ is 328 nm and the emission λ is 393 nm. Briefly, the assay is carried out by incubating 176 μl 1× HEPES buffer (0.2 M NaCl, 10 mM CaCI₂, 0.05% Brij-35 and 50 mM HEPES, pH 7.5) with 4 μl of substrate solution (50 μM) at 25° C. for 15 minutes, and then adding 20 μl of a purified polypeptide of the invention into the assay cuvett. The final concentration of substrate is 1 μM. Initial hydrolysis rates are monitored for 30-min.

### Example 66

### Characterization of the cDNA Contained in a Deposited Plasmid

[1345] The size of the cDNA insert contained in a deposited plasmid may be routinely determined using techniques known in the art, such as PCR amplification using synthetic primers hybridizable to the 3′ and 5′ ends of the cDNA sequence. For example, two primers of 17-30 nucleotides derived from each end of the cDNA (i.e., hybridizable to the absolute 5′ nucleotide or the 3′ nucleotide end of the sequence of SEQ ID NO:X, respectively) are synthesized and used to amplify the cDNA using the deposited cDNA plasmid as a template. The polymerase chain reaction is carried out under routine conditions, for instance, in 25 ul of reaction mixture with 0.5 ug of the above cDNA template. A convenient reaction mixture is 1.5-5 mM MgCl₂, 0.01% (w/v) gelatin, 20 uM each of dATP, dCTP, dGTP, dTTP, 25 pmol of each primer and 0.25 Unit of Taq polymerase. Thirty five cycles of PCR (denaturation at 94 degree C for 1 min; annealing at 55 degree C for 1 min; elongation at 72 degree C for 1 min) are performed with a Perkin-Elmer Cetus automated thermal cycler. The amplified product is analyzed by agarose gel electrophoresis. The PCR product is verified to be the selected sequence by subcloning and sequencing the DNA product.

[1346] Use of the above methodologies and/or other methodologies known in the art generates fragments from the clone corresponding to the approximate fragments described in Table 8, below. Accordingly, Table 8 provides a physical characterization of certain clones encompassed by the invention. The first column provides the unique clone identifier, “Clone ID NO:Z”, for cDNA clones of the invention, as described in Table 1A. The second column provides the approximate size of the cDNA insert contained in the corresponding cDNA clone.

TABLE 8

| | |
|---|---|
| | cDNA |
| Clone ID | Insert |
| NO:Z | Size: |

No entries

[1347] It will be clear that the invention may be practiced otherwise than as particularly described in the foregoing description and examples. Numerous modifications and variations of the present invention are possible in light of the above teachings and, therefore, are within the scope of the appended claims.

[1348] The entire disclosure of each document cited (including patents, patent applications, journal articles, abstracts, laboratory manuals, books, or other disclosures) in the Background of the Invention, Detailed Description, and Examples is hereby incorporated herein by reference. In addition, the CD-R copy of the sequence listing submitted herewith and the corresponding computer readable form are both incorporated herein by reference in their entireties. The specification and Sequence Listing of each of the following U.S. applications are herein incorporated by reference in their entirety: Application No. 60/179,065, filed on Jan. 31, 2000; Application No. 60/180,628, filed on Feb. 4, 2000; Application No. 60/214,886, filed on Jun. 28, 2000; Application No. 60/217,487, filed on Jul. 11, 2000; Application No. 60/225,758, filed on Aug. 14, 2000; Application No. 60/220,963, filed on Jul. 26, 2000; Application No. 60/217,496, filed on Jul. 11, 2000; Application No. 60/225,447, filed on Aug. 14, 2000; Application No. 60/218,290, filed on Jul. 14, 2000; Application No. 60/225,757 , filed on Aug. 14, 2000; Application No. 60/226,868, filed on Aug. 22, 2000; Application No. 60/216,647, filed on Jul. 7, 2000; Application No. 60/225,267, filed on Aug. 14, 2000; Application No. 60/216,880, filed on Jul. 7, 2000; Application No. 60/225,270, filed on Aug. 14, 2000; Application No. 60/251,869, filed on Dec. 8, 2000; Application No. 60/235,834, filed on Sep. 27, 2000; Application No. 60/234,274, filed on Sep. 21 2000; Application No. 60/234,223, filed on Sep. 21, 2000; Application No. 60/228,924, filed on Aug. 30, 2000; Application No. 60/224,518, filed on Aug. 14, 2000; Application No. 60/236,369, filed on Sep. 29, 2000; Application No. 60/224,519, filed on Aug. 14, 2000; Application No. 60/220,964, filed on Jul. 26, 2000; Application No. 60/241,809, filed on Oct. 20, 2000; Application No. 60/249,299, filed on Nov. 17, 2000; Application No. 60/236,327, filed on Sep. 29, 2000; Application No. 60/241,785, filed on Oct. 20, 2000; Application No. 60/244,617, filed on Nov. 1, 2000; Application No. 60/225,268, filed on Aug. 14, 2000; Application No. 60/236,368, filed on Sep. 29, 2000; Application No. 60/251,856, filed on Dec. 8, 2000; Application No. 60/251,868, filed on Dec. 8, 2000; Application No. 60/229,344, filed on Sep. 1, 2000; Application No. 60/234,997, filed on Sep. 25, 2000; Application No. 60/229,343, filed on Sep. 1, 2000; Application No. 60/229,345, filed on Sep. 1, 2000; Application No. 60/229,287, filed on Sep. 1, 2000; Application No. 60/229,513, filed on Sep. 5, 2000; Application No. 60/231,413, filed on Sep. 8, 2000; Application No. 60/229,509, filed on Sep. 5, 2000; Application No. 60/236,367, filed on Sep. 29, 2000; Application No. 60/237,039, filed on Oct. 2, 2000; Application No. 60/237,038, filed on Oct. 2, 2000; Application No. 60/236,370, filed on Sep. 29, 2000; Application No. 60/236,802, filed on Oct. 2, 2000; Application No. 60/237,037, filed on Oct. 2, 2000; Application No. 60/237,040, filed on Oct. 2, 2000; Application No. 60/240,960, filed on Oct. 20, 2000; Application No. 60/239,935, filed on Oct. 13, 2000; Application No. 60/239,937, filed on Oct. 13, 2000; Application No. 60/241,787, filed on Oct. 20, 2000; Application No. 60/246,474, filed on Nov. 8, 2000; Application No. 60/246,532, filed on Nov. 8, 2000; Application No. 60/249,216, filed on Nov. 17, 2000; Application No. 60/249,210, filed on Nov. 17, 2000; Application No. 60/226,681, filed on Aug. 22, 2000; Application No. 60/225,759, filed on Aug. 14, 2000; Application No. 60/225,213, filed on Aug. 14, 2000; Application No. 60/227,182, filed on Aug. 22, 2000; Application No. 60/225,214, filed on Aug. 14, 2000; Application No. 60/235,836, filed on Sep. 27, 2000; Application No. 60/230,438, filed on Sep. 6, 2000; Application No. 60/215,135, filed on Jun. 6, 2000; Application No. 60/225,266, filed on Aug. 14, 2000; Application No. 60/249,218, filed on Nov. 17, 2000; Application No. 60/249,208, filed on Nov. 17, 2000; Application No. 60/249,213, filed on Nov. 17, 2000; Application No. 60/249,212, filed on Nov. 17, 2000; Application No. 60/249,207, filed on Nov. 17, 2000; Application No. 60/249,245, filed on Nov. 17, 2000; Application No. 60/249,244, filed on Nov. 17, 2000; Application No. 60/249,217, filed on Nov. 17, 2000; Application No. 60/249,211, filed on Nov. 17, 2000; Application No. 60/249,215, filed on Nov. 17, 2000; Application No. 60/249,264, filed on Nov. 17, 2000; Application No. 60/249,214, filed on Nov. 17, 2000; Application No. 60/249,297, filed on Nov. 17, 2000; Application No. 60/232,400, filed on Sep. 14, 2000; Application No. 60/231,242, filed on Sep. 8, 2000; Application No. 60/232,081, filed on Sep. 8, 2000; Application No. 60/232,080, filed on Sep. 8, 2000; Application No. 60/231,414, filed on Sep. 8, 2000; Application No. 60/231,244, filed on Sep. 8, 2000; Application No. 60/233,064, filed on Sep. 14, 2000; Application No. 60/233,063, filed on Sep. 14, 2000; Application No. 60/232,397, filed on Sep. 14, 2000; Application No. 60/232,399, filed on Sep. 14, 2000; Application No. 60/232,401, filed on Sep. 14, 2000; Application No. 60/241,808, filed on Oct. 20, 2000; Application No. 60/241,826, filed on Oct. 20, 2000; Application No. 60/241,786, filed on Oct. 20, 2000; Application No. 60/241,221, filed on Oct. 20, 2000; Application No. 60/246,475, filed on Nov. 8, 2000; Application No. 60/231,243, filed on Sep. 8, 2000; Application No. 60/233,065, filed on Sep. 14, 2000; Application No. 60/232,398, filed on Sep. 14, 2000; Application No. 60/234,998, filed on Sep. 25, 2000; Application No. 60/246,477, filed on Nov. 8, 2000; Application No. 60/246,528, filed on Nov. 8, 2000; Application No. 60/246,525, filed on Nov. 8, 2000; Application No. 60/246,476, filed on Nov. 8, 2000; Application No. 60/246,526, filed on Nov. 8, 2000; Application No. PT172, filed on Nov. 17, 2000; Application No. 60/246,527, filed on Nov. 17, 2000; Application No. 60/246,523, filed on Nov. 8, 2000; Application No. 60/246,524, filed on Nov. 8, 2000; Application No. 60/246,478, filed on Nov. 8, 2000; Application No. 60/246,609, filed on Nov. 8, 2000; Application No. 60/24-6,613, filed on Nov. 8, 2000; Application No. 60/249,300, filed on Nov. 17, 2000; Application No. 60/249,265, filed on Nov. 17, 2000; Application No. 60/246,610, filed on Nov. 8, 2000; Application No. 60/246,611, filed on Nov. 8, 2000; Application No. 60/230,437, filed on Sep. 6, 2000; Application No. 60/251,990, filed on Dec. 8, 2000; Application No. 60/251,988, filed on Dec. 5, 2000; Application No. 60/251,030, filed on Dec. 5, 2000; Application No. 60/251,479, filed on Dec. 6, 2000; Application No. PJ005, filed on Dec. 5, 2000; Application No. PJ006, filed on Dec. 1, 2000; Application No. 60/251,989, filed on Dec. 8, 2000; Application No. 60/250,391, filed on Dec. 1, 2000; and Application No. 60/254,097, filed on Dec. 11, 2000.

[1349] Moreover, the microfiche copy and the corresponding computer readable form of the Sequence Listing of U.S. Application Ser. No. 60/179,065, and the hard copy of and the corresponding computer readable form of the Sequence Listing of U.S. Application Ser. No. 60/180,628 are also incorporated herein by reference in their entireties.

The application's sequence listing, which the Patent Office published only in electronic form, follows.

SEQUENCE LISTING (334 sequences)

SEQ ID NO: 1 - DNA, 733 bp, Homo sapiens
gggatccggagcccaaatcttctgacaaaactcacacatgcccaccgtgcccagcacctgaattcgagggtgcaccgtcagtcttcctcttccccccaaaacccaaggacaccctcatgatctcccggactcctgaggtcacatgcgtggtggtggacgtaagccacgaagaccctgaggtcaagttcaactggtacgtggacggcgtggaggtgcataatgccaagacaaagccgcgggaggagcagtacaacagcacgtaccgtgtggtcagcgtcctcaccgtcctgcaccaggactggctgaatggcaaggagtacaagtgcaaggtctccaacaaagccctcccaacccccatcgagaaaaccatctccaaagccaaagggcagccccgagaaccacaggtgtacaccctgcccccatcccgggatgagctgaccaagaaccaggtcagcctgacctgcctggtcaaaggcttctatccaagcgacatcgccgtggagtgggagagcaatgggcagccggagaacaactacaagaccacgcctcccgtgctggactccgacggctccttcttcctctacagcaagctcaccgtggacaagagcaggtggcagcaggggaacgtcttctcatgctccgtgatgcatgaggctctgcacaaccactacacgcagaagagcctctccctgtctccgggtaaatgagtgcgacggccgcgactctagaggat

SEQ ID NO: 2 - protein, 5 aa, Homo sapiens
  Site (3): Xaa equals any of the twenty naturally ocurring L-amino acids
WSXWS

SEQ ID NO: 3 - DNA, 86 bp, Artificial Sequence
  Primer_Bind: Synthetic sequence with 4 tandem copies of the GAS binding site found in the IRF1 promoter (Rothman et al., Immunity 1:457-468 (1994)), 18 nucleotides complementary to the SV40 early promoter, and a Xho I restriction site.
gcgcctcgagatttccccgaaatctagatttccccgaaatgatttccccgaaatgatttccccgaaatatctgccatctcaattag

SEQ ID NO: 4 - DNA, 27 bp, Artificial Sequence
  Primer_Bind: Synthetic sequence complementary to the SV40 promter; includes a Hind III restriction site.
gcggcaagctttttgcaaagcctaggc

SEQ ID NO: 5 - DNA, 271 bp, Artificial Sequence
  Protein_Bind: Synthetic promoter for use in biological assays; includes GAS binding sites found in the IRF1 promoter (Rothman et al., Immunity 1:457-468 (1994)).
ctcgagatttccccgaaatctagatttccccgaaatgatttccccgaaatgatttccccgaaatatctgccatctcaattagtcagcaaccatagtcccgcccctaactccgcccatcccgcccctaactccgcccagttccgcccattctccgccccatggctgactaattttttttatttatgcagaggccgaggccgcctcggcctctgagctattccagaagtagtgaggaggcttttttggaggcctaggcttttgcaaaaagctt

SEQ ID NO: 6 - DNA, 32 bp, Artificial Sequence
  Primer_Bind: Synthetic primer complementary to human genomic EGR-1 promoter sequence (Sakamoto et al., Oncogene 6:867-871 (1991)); includes a Xho I restriction site.
gcgctcgagggatgacagcgatagaaccccgg

SEQ ID NO: 7 - DNA, 31 bp, Artificial Sequence
  Primer_Bind: Synthetic primer complementary to human genomic EGR-1 promoter sequence (Sakamoto et al., Oncogene 6:867-871 (1991)); includes a Hind III restriction site.
gcgaagcttcgcgactccccggatccgcctc

SEQ ID NO: 8 - DNA, 12 bp, Homo sapiens
ggggactttccc

SEQ ID NO: 9 - DNA, 73 bp, Artificial Sequence
  Primer_Bind: Synthetic primer with 4 tandem copies of the NF-KB binding site (GGGGACTTTCCC), 18 nucleotides complementary to the 5' end of the SV40 early promoter sequence, and a XhoI restriction site.
gcggcctcgaggggactttcccggggactttccggggactttccgggactttccatcctgccatctcaattag

SEQ ID NO: 10 - DNA, 256 bp, Artificial Sequence
  Protein_Bind: Synthetic promoter for use in biological assays; includes NF-KB binding sites.
ctcgaggggactttcccggggactttccggggactttccgggactttccatctgccatctcaattagtcagcaaccatagtcccgcccctaactccgcccatcccgcccctaactccgcccagttccgcccattctccgccccatggctgactaattttttttatttatgcagaggccgaggccgcctcggcctctgagctattccagaagtagtgaggaggcttttttggaggcctaggcttttgcaaaaagctt

SEQ ID NO: 11 - DNA, 472 bp, Homo sapiens
gaggaaagagttctctccctatggagtaattaccagtgcgaaggtgaggactgggggcacctccgggggacagcgttcccctccatcctctcaccaccatccccccacaaccccacccctccaccctctcgcccagcagccttcagggggttggtgccggctaccccttctggggctctgctgaccccgttggagcttgtagccatctgcagccttgtctgggctggaggggaagagggtagaaatatagtcccagtcacacagctggacttggggctcactgtcaccttggcatttattgagtgcctactgtatgccagattccagaaattcatggggtagtatttccattgacttttgttgtctggcctctgccagtgacattaccctctgggcctccgttttcccaattccyttgggaaagtgagagggctggacttcgtcattcttcatttgtcttccctatttcgga

SEQ ID NO: 12 - DNA, 676 bp, Homo sapiens
gccagcccaggtcttggaggagcacaatctagtgttctacacaatgggtttttccatgggtctccaggagagctattatacacccagaagatccagcctttaccagcgctctctcctttttctctcttgctccccttccctatgccaaggagtaggcaaaggttgacatttcgcacctccattgcccagctcattctaaggcctttatttaaagggtggataatggcacatagaaratgtgtctataacaggtagcacatttcctatggtgcttggcatatgtcttagtcttttcgggctgctataacaaaataccatagactgggtgggcttataaacaacagaaatttatwtctaacagttctggagtctgggaaatctaagatcaaggtgctggcagatttggtgtctgatgacggwctgattcctagyagatggctgtcttctcactataactcacatggcagaaggcacaagggatctctccgatgtctctttgataagtgcactaaaccagattaaatttgattcaaggcctcctttgtcaagatggataatcagtccaagaattctagaacaggaggtgtccccctgtcatgggcggctctgtcctgcctggccccgccctccaaggcgtgcgcacatttgtcagcagcagacatacgtgtggctggtg

SEQ ID NO: 13 - DNA, 745 bp, Homo sapiens
  SITE (1): n equals a,t,g, or c
  SITE (56): n equals a,t,g, or c
  SITE (58): n equals a,t,g, or c
  SITE (397): n equals a,t,g, or c
  SITE (512): n equals a,t,g, or c
  SITE (687): n equals a,t,g, or c
  SITE (711): n equals a,t,g, or c
nccccccccctttttttttttttttttttttttttttttttttttttttttttttntnaccattagattgtaaatttaatttaaaataaaatgtccctaaaatcatctcagtacttggcacactgacttaagatgtggggtgggggagcatcccttaacacattctttgttttcctggtawatamtggtgsmmcaagacagctgagaatgtatgacatctgaccatgaacatatgacagctgtttgtgccagtcatgtccaaacccatggctctcaactccagatccaaaaactctccccatgttttagacctcccacaccagcatttaggatttcttcctctataatcttgctgggtgctggtcttggcagggccatctactggggataggtggtntggggtctcagtggtgggcaccggcttgttcttgcctcctctgcagctcctcttgccgcctcgcctgctgttcactcatgcaatccttgaacgcctgcacctgtggctgcattgncgcagtcctgggctggccatgcactctgactgcaagtggagcagcacaccagagcgggaacactggtccacggtctctcctatcgcttcttcaccgtggtccagatggcttgagactagtgcggacgctggtgaatttcccgaatcccgacgtacagccctgctttgacaactgnctttaggactaataggccatggcncaggttctggtggatggtatctccgggctgggtg

SEQ ID NO: 14 - DNA, 539 bp, Homo sapiens
  SITE (470): n equals a,t,g, or c
  SITE (491): n equals a,t,g, or c
  SITE (530): n equals a,t,g, or c
  SITE (533): n equals a,t,g, or c
gggaaccgccggctgtggggttggaaccgccggctgtgagtttcctcactgcttggaggaagatgagaattctcagaggtccttatgctgccctttttgctgcagtcttgacatcttaacgtggatagaaaaaggccgtgcagcatcgaagacaggaggaactggagcctcattggccggcccggggcgccggcctcgggcttaaataggagctccgggctctggctgggacccgaccgctgccggccgcgctcccgctgctcctgccgggtgatggaaaaccccagcccggccgccgcctgggcaaggccctctgcgctctcctcctggccactctcggcgccgccggccagcctcttgggggagagtccatctgttccgccagagccccggccaaatacagcatcaccttacgggcaagtggagccagacggcttcccaagcagtacccctgttccgccccctgccantggcttcgttgctgggggcgncatagttccgctacagcatgtggaggaagaaccagtccntantaacgg

SEQ ID NO: 15 - DNA, 634 bp, Homo sapiens
  SITE (554): n equals a,t,g, or c
  SITE (560): n equals a,t,g, or c
  SITE (566): n equals a,t,g, or c
  SITE (628): n equals a,t,g, or c
  SITE (632): n equals a,t,g, or c
ggttacgacggattttctgccagcctgcaggtctctgtacccttcagaccaccttgctctggttcctgggcagagctcagcagtacttggcagcatgggacccagcttccttcctgctcctgatccaaaaggacttacctcctctgttgcatgaggcagaagctttgtatagcctggcctcagaggaaagcttagctctggaagtggagcagcagctgggcctggagatccagaagctgactgcacagatccagctcctgcctgaagagtcactaagtgtcttttctcaagaatgtcataaacaagccatgcaaggtttcaagctctacatgccacggggtcggtactggcggcttcgtctctgtcctgaacctcccagtgctcctagtgagtatgctggtttagtggtccgcaccgtactggagcctgtgttgcaaggattgcaagggttgccacctcaagcccaggcccctgcccttggtcaggctctgacggscatcgtgggtgcctggcttgaccacattcttacccatgggattcggttcaacctgcanggagcnctkcancttaaacaagactttgrartggtcaggagtttgtggaaaagagcatggacctgtccctgatntcgnca

SEQ ID NO: 16 - DNA, 534 bp, Homo sapiens
  SITE (415): n equals a,t,g, or c
  SITE (476): n equals a,t,g, or c
  SITE (477): n equals a,t,g, or c
  SITE (531): n equals a,t,g, or c
  SITE (533): n equals a,t,g, or c
gctcttcacttggatagatgcttttagatatttggcccttatgtttcaagaagatattgatctagaatgtatctcttcatttaaatagattatcaaatacttacaatcagtcttcatttaaaaaaaaatctgttacctgtttaagagtatggctttgttttcttttgtttttttgttttgttttatttattttttaattccagaagaaatctttaaagctagttgctaagagtaggagtagaaactttcggtctccccatgttacaatatttggatatctttcagctctaaaatctttttttcagatttgtaatttagatgtgtaatgacaaaaatgaaaggctctgaatttcaatatcatatcaaatatttttatttcaagtgtttaatggatgtaagggactaagttattggnaatggtatagggaattcaatttctttttcatgattttaatcactgcaaattggaaaggtcnnataaatggggccaatttaaaaatttttttttccttctaacaaaacctggggaanang

SEQ ID NO: 17 - DNA, 646 bp, Homo sapiens
  SITE (1): n equals a,t,g, or c
  SITE (5): n equals a,t,g, or c
  SITE (23): n equals a,t,g, or c
  SITE (24): n equals a,t,g, or c
  SITE (555): n equals a,t,g, or c
naggnaaacttcactcactattnngaaagctgcccgcctgcmggtaccggtccggaattcccgggtcgacccacgcgtccgcccacgcgtccggttgataatgcaatagataatgtaaaagaaattcaagttgcattgtttatcttaatggcagcttatgcaatggcggaagcgtttatgtcaacaggagttggagcttctcttatcctaattgcattaaaagtaggaattactgctaaaactgttgcagttataggagctattgtcacatcaatattatcaatagcaactgggacaagttggggaacatttgcagcctgtgcacctatttttttatggctaaatcatatagttggcggaaatattttattgacaacagcagctattgcaggargagcatgttttggagataatataggacttatttcagatactacaatagtaagktctggtatccaaaaagttgaagttgtaagaagaattagacaccaaggtgkatggtcagcattagttttattatcaggaataatagtatttgctattggtggawttacnatggatttamctttaacaggtggagatcctgctgaactwttaatagtattycagctgatgtttggcargacttgctgaaaaagagaatcac

SEQ ID NO: 18 - DNA, 2012 bp, Homo sapiens
  SITE (32): n equals a,t,g, or c
  SITE (2002): n equals a,t,g, or c
  SITE (2004): n equals a,t,g, or c
cgaactcctctcctcccaagcagaggcgagtnagtggcattagctcccggacccattcccggtcctagctgggcatggggctgacggagatgaccaagcctcgcccattagcttgattcaaacaaagccccagcaggcctttgcgtttttatccttcataaccttcatcttaatttgaacttgtagcttggactttaaggtarcatggcyctattgctgtcaatttactgtttcactcacagcaatcacagccagtgaatgttacacacatcttgctagactagtataaaaatcattgggtaattgttggttctaatgacctgaaaggtgttcagtttttgttcttggttttgttttgtttttgatttcttgggggtgggttttgcttgttgttccttttcatttgggggtttttggggaaaaaatttatttttggttccaaatagaaaaacaaaacctattttgatctttagtgcaaacgagggctagggacttagcctcctccaccacctccacactgcttcattctgccattcactcactgcagcatattcaagaataaagcaatatcgtttactacattttttattgaaggtcagccatgctttctgtattatattgcatatgaaattgtttacaaaagaaacactaactcatacttctctttattggttgcaagtggcacgcaggaacagagggagagtggggggctggtgggggaggggagatttttttttttttttcttgaatgtgcttcgcaagccaggctatcttccaaggaaggcagacagtgggagagcagagggactgactgcaggcaagcacattgaagaaagacactggcgggtttccccaccctcaccccaaagcagaaaactagcagacgtcagctcagccccgtcctgggcacagacactacacaaggagacgctggaagttaagcaatactttaatactgtaatatgtttgttttctttttctttcttttttttctaccaaaaaaaagtaagtaaactaaaacacaaaaacatataaataaaatccatccctcttgtcggggacctgcaggggggcaaccttaatccaaacacctggctatcaaataatcagaatgtattgtctcagacaggatttcagttccgggaggcaggggcatgatgggggagggggccggasgctgagagacaaaagttccagagcctccctcgaaggttctctactactgtattctgtacataatgtaccatcccatgtggaatctgtgagtgtcctcttaagtagcgtgggctagccaatctgccgttcatggtgtattgtaaactccgaattccatatgtaataggatgcaagtctaagcgtttcatgtggacataaatgtatctaaataaaactttccctagcactgtggctgacctcacccttacttttatactttagtatgaaactgatgagaactttggtagtgagtattttttttatatatatacatatatatgtatctatctatatatatatctcaagcatctttcaggtctttgtgtgtggctttcttaaagccctgttgtaaaaaattactatgtggatggcagtctctcacatcacagatgtggaaagtataattttatatttgtattttcaaataaataagtttgtgaaaggtttccatcctctactgtggtccagaaagatgcttgagatatatatatakatagatacatatatatgtatatatataaaaaaaatactcactacaaaagttccagagcctccctcgaaggttctctactactgtattctgtacataatgtaccatcccatgtggaatctgtgagtgtcctcttaagtagcgtgggctagccaatctgccgttcatggtgtattgtaaactccgaattccatatgtaataggatgcaagtctaagcgtttcatgtggacataaatgtatctaaataaaactttccctagcactgtggctgacctacccttacttttatactttantntgaaactg

SEQ ID NO: 19 - DNA, 602 bp, Homo sapiens
  SITE (565): n equals a,t,g, or c
  SITE (566): n equals a,t,g, or c
  SITE (567): n equals a,t,g, or c
  SITE (590): n equals a,t,g, or c
  SITE (594): n equals a,t,g, or c
tgcataacatattctagagagagaagggtgtgggcatgagttagggctggaaaaacaggttggaaacagataagtaagggtctcaaatgcaatgtcaaagagcttgcagtttattttmcaggcaatgagtaggcagccaaaaaaaaaaagtaaggatgttttttttttttttcccatggcatcatatttaagaggatggatttaaattgtgtgagaccaaagcatagagactagataagaggcgatcaaaatatttcaaaaagaaataatgaagatccaatgaaggaagtggaaattaaaatagggaagagagtagatggattagagagacatttaagagatggaatcaatagatcctgttactagataatggaagtaagaggtgaggaagagtggaaaagtcattaatgactctaaagatttctgcttggctgcttaccaagattggcaacawamsggwgggaraaaggtttggaaaaagaagagaaaggataatgaagtttgacttttacatagaaatgaaagggcctttccagatttggaaatcttttgggttaaataattnnnaaatttttgacctagaaaatttngganggaaacct

SEQ ID NO: 20 - DNA, 537 bp, Homo sapiens
attccaaagctgcctcctgaaaggacgtttcctaaaaggtgttgctttggggtaaataagaggtgctggtgaagtgagactagcttgcgcatctctctgccatgaaggaaactagctccgcagacgttttactaaccacagcagaccccctccttgaggaacccagaagggcagagagcatcagatgaaatcaactgctgagagagggaagtgagtgctgtgttggcaccgctgccagaaactcttgagaatgagcatcgtgtgccacttatccactgcttgccgacttcagtagcaagagcctccagaatgctcatggataaacatcatctttgtggccacacattgttttatgagctgagtcatcagactggctggctccttaaatgctgctgtgtgattctctaggcagcagaaaacaaggagagaagatatgaagtgtatctcatcgagctttgtagagggccagtatcgattcaccaaaggtgatgggggatttaccattatggagtttgcttgtgataaaaaattattgat

SEQ ID NO: 21 - DNA, 353 bp, Homo sapiens
  SITE (221): n equals a,t,g, or c
  SITE (265): n equals a,t,g, or c
  SITE (310): n equals a,t,g, or c
gccactgtctacattccccagccagtggggttgtggttggttggtatagaatggtgggaattcaaatttttctaaactcatggtaagtatattgtaaaattcttagtacatatgtattttacaatatacttaccatgagtttagaaaaatacatatgtactaagaattttcaaaattggtttgttcagtgtggagtatattcagcagtatttttgacattnttctttagaaaaaggaagagctaaaggaattttataagttttgntacatgaaaggttgaaatattgagtggttgaaagtgaactgctgnttgcctgattggtaaccaacacactacaattgatatcaaaagg

SEQ ID NO: 22 - DNA, 344 bp, Homo sapiens
  SITE (43): n equals a,t,g, or c
  SITE (335): n equals a,t,g, or c
tgcaggtaccggtccggaattcccgggtcgacccacgcgtccnttagggttcaagtaaatgcaaatgatgttttggcaaccttttctcaaaagattctgcattggaatacagactgtaatattaaactactatgtgtatattgtttctacagttgtatacaccgtagtgtcttttacaggtatataaggtcaatggccctagtctaattcagatttaaactagtgcttgccttgtaactctgcaagtgatcaataatctcttaatactgaaagtcacamwraaarwmamaaaaaaaaaaaaaaaaaaaaaaaaaaaaaaaaaaaagggcggccgntctaaagag

SEQ ID NO: 23 - DNA, 200 bp, Homo sapiens
  SITE (200): n equals a,t,g, or c
gggatgcggaccaccttttgcagaactcatatctcgagcagtttaaattgcttgtgcctgttaacaagaatactgaccagaatgctcttcatgtagcttatacagttggttcacttcatgcggttcttgacatgtttatttctacccttaatgcaatgaaatgtttcattaataaaaaaccactttatataaaaaaaaan

SEQ ID NO: 24 - DNA, 681 bp, Homo sapiens
  SITE (20): n equals a,t,g, or c
  SITE (543): n equals a,t,g, or c
  SITE (576): n equals a,t,g, or c
  SITE (625): n equals a,t,g, or c
  SITE (650): n equals a,t,g, or c
  SITE (654): n equals a,t,g, or c
tccctatagggaaagctggnacgcctgcmggtaccggtccggaattcccgggtcgacccacgcgtccgctctgaaaatgatctacagcacgatccagaagaaatgaactttgtgggaaaagaacaaaaggccacccaaagaggccaagctgtgatggaaaagaaaaccaacaggatgagatgaaaggggagattaacaagcaaaataagaattgcaaggaaatgaaatgctaggcgacttacaatccttcttgggggcagtgagagcggtgatgctggatgtgaaatcagtgacatggaaggcaaactggaaaccctggatgaaagtgtatcatgcacagaataccaaaaaagataaatccagaagacacagagccagtgttggttttcctgaggaagagacagcttgaaaaaaggtctgtgtttgcagaccaatacctgaaagtaaatccaaaggaaacagatccgccacttagacacatggtggcaaaaatgtttaataaccaagtgtcaggggtagaaaaagaatggccagatagaatgngcrcccttccctgcccctctatcccaagaaggngctatgttggctgctggggtctgctctgcacccaggttgaatgcagtgnaccgcatagccacttcagctaactnctgntagtgctctgttagctccaaggcggat

SEQ ID NO: 25 - DNA, 391 bp, Homo sapiens
  SITE (295): n equals a,t,g, or c
  SITE (322): n equals a,t,g, or c
  SITE (374): n equals a,t,g, or c
gtgtattttacaatttttttaaaggaaaatttaaaatatgaaatgtttgttttgtcttaacagggtatcccttctccctcccttgtcagccttccttccttctttgaaaggagaagtcatacgttaagtagatctacaactcatttgatatgaagcgttaccaaaatcttaaattatagaaatgtatagacacctsatactcaaataagaaactgacttaaatggtacttgtaattagcacttggtgaaagctggaaggaagataaataacactaaactatgctatttgattttncttcttgaaagagtaaggtttacctgntacattttcaagttaattcatgtaaaaaatgatagtgattttgatgtaattnatctcttgatcgaatct

SEQ ID NO: 26 - DNA, 372 bp, Homo sapiens
  SITE (319): n equals a,t,g, or c
  SITE (320): n equals a,t,g, or c
  SITE (339): n equals a,t,g, or c
gcctcattcatagactcaagaagcccaacaaattccaaaccaaataaagaaaaattcacaactatagccatcattgtgatgctacagaataccaaaatcagagataaaaatgttaaaagccagtcaaagcagagtgagactctgtctcaaaaaaaaaaaaaaaagccagtcaaagtacctaagaccaaatgtaggacatatagcttacttttcaatggtaatagtgaaagccagaggacaatgaaattatatcttaaatatgttaaatgaaattagaattctatattcagtagaccagttgttcccaaccaaggtaatnntgctcccaggagatactgntagttgaccaacttgagaaaggaagtgatacgg

SEQ ID NO: 27 - DNA, 637 bp, Homo sapiens
  SITE (26): n equals a,t,g, or c
  SITE (561): n equals a,t,g, or c
  SITE (632): n equals a,t,g, or c
aaactcactactattcggaaagctgnccgcctgcaggtaccggtccggaattcccgggtcgacccacgcgtccggaacagggaaagaaagggacagagatggaaaatcctattttattgttttgactttagacatccagaaagggttactaactttaaaactttaaataaagttgccctgtgttggggaagaaatctggcaatcctagttactttgaagtcacgctaccctttttcactagagtctccctgacccaagagaacagggaagggccggtaggatacacataacagtagctccttttacttggctggatttaggtatgccaggagcagggtgcagtattaggccagaaatctctgttggtctctgcttgcctctcagtgctaatgtggtcagctctccttgactgtagaccatccagccaaatccaagctctgcttttctcttttggactcaggacccattaaactcagtaacctcattaaattctgcctgcacatttctcctttcttttcttttcttttttttttttgagaccatgtctcaaaaaaaaaaatnamaatatatatatatatagagagagcgagcgagagagagagagagagcagagcaaggggtaaccaagaccncctag

SEQ ID NO: 28 - DNA, 504 bp, Homo sapiens
  SITE (5): n equals a,t,g, or c
  SITE (6): n equals a,t,g, or c
  SITE (8): n equals a,t,g, or c
  SITE (453): n equals a,t,g, or c
caccnncnactatcgggaaagctggtacgcctgcaggtaccggtccggaattcccgggtcgacccacgcgtccgcggacgcgtgggtgtcgatgaaatcaagagtgtgatgttctagttatttttttttatatatatttttaaatgttcaatattcaactattgaaacaaatgtacatctgtgaactagctaaaatcatcttatgtaccactaatatgcccagcacattttgtaaaacagtcctgatttggcctccaagggtatttattgaactaccagcagtatctaggagaccacgaaggaataccacgaaggaatttatgctccagwgcttgccataatttgtctgagaaggaatctgttaaataaaagcttttatcctctaaaaaaaaaaaaaaagggcggccgctctagaggatccaagcttacgtacgcgtgcatgcgacgtcatanctcttctatagtgtcacctaaattcaattcactggccgtcgttttacaacg

SEQ ID NO: 29 - DNA, 216 bp, Homo sapiens
  SITE (191): n equals a,t,g, or c
  SITE (207): n equals a,t,g, or c
attttggtgaaaaatatttagctgagggcagtatagaacttataaaccaatatattgatatttttaaaacatttttacatataagtaaactgccatctttgagcataactacatttaaaaataaagctgcatatttttaaaaaaaaaaaaaaaaaaaaaaaaaaaaaaaaaaaaaaaaaargggggggggncccccaaaaaaacccnttttttttt

SEQ ID NO: 30 - DNA, 536 bp, Homo sapiens
  SITE (436): n equals a,t,g, or c
  SITE (460): n equals a,t,g, or c
  SITE (468): n equals a,t,g, or c
  SITE (494): n equals a,t,g, or c
  SITE (534): n equals a,t,g, or c
gccagatcactgacggtggggtaaaggtgctaagcgaagagctgaccaaatacaaaattgtgacctatttgggtttatacaacaaccagatcaccgatgtcggarccaggtacgtcaccaaaatcctggatgaatgcaaaggcctcacgcatcttaaactgggaaaaaacaaaataacaagtgaaggagggaagtatctcgccctggctgtgaagaacagcaaatcaatctctgaggttgggcttatccagaatcagatcacagctaaggggactgccagctggcagatgcsttacagagcacactggcataacagagatttgcctaaatggaaacctgataaaaccagaggaggccaaagtctatgaagatgagaagcggattatctgkttctgagaggatgctttcctgttcatggggtttttgcctggacctnagcagcaaatgccactctgggcantcttttgnggcagtgtcttaaaggggcctgccangcgggactatcaggagtcactgcttcatgatgcaagccantt

SEQ ID NO: 31 - DNA, 608 bp, Homo sapiens
  SITE (607): n equals a,t,g, or c
gattaatgtgagtaacaggaatgtgtctttaaaaagctagagtggttacatttaatcaggcagtaagataatttgggttcttgagttgttttggagtaatatcccacaactggggtaggaagctcaggacttttttctttaaagctagtcatttcaaaagcatattgtatttttttgaatgactacagtatggacaatttcaaaaaccaaaacccactttggattggtggaagtaaaaactggtaactcactcaaaaaaatacaatatgcttttgaaatgaccattttgggactaaaatacttggtgatgaaatgacatacacctttaaacttgytatggagatagtttaatgtaaaaccaactacggaaaaccctcracttaaggatacagcttggaaattggaactgcaattgccttttattaaaaccatatggtgtgatgtttgtttttaaaattatataagactttatgctgtcacttctcttgctgkactgtaattcatgttttaaatgaatttgataatgaaattatactattatcattcttgatgaatacttttcttatttttatgatttttctaatgaaactttaaacttttgaaaaana

SEQ ID NO: 32 - DNA, 718 bp, Homo sapiens
  SITE (718): n equals a,t,g, or c
gccaagatgtttttagtaggtgaatggataaatcaactataatacatctcaacagtggaatgttatttagctctaaaagaaaatgagctgtcatccaatgaaaagacatggaagaaacttaaatatttatcactaagtggaggatgttaatctgaaaagactacatgccctatgattccaacaatttaacattctggaaaaagcaaaactatggagacaataaaaaattagtggtttctaggtgttaggggagagagaggaatttacagctgaggcacagagaatttttaagatagtgaaatgattctgtatgatactataatgttggatacatgtcattatatatttatccagacctataaaatgtcatgaccaagactgaccctgatgtaaactatggatttttggtaatgataggtaaatgtaggttcaataataataacatatatactactttgatgggggatattgataattgktgaggctatgcatgtgtcagggstacaaggcatatgagaactctcccttccatccaactttgttgtgaacttaaagtctgctaaaaaagcaagcagataaattgccattcaacatgacagcctctaacaacatctgacttttagatttaaactaaaaagtaaactataaagttcttttagacaatcttgtcatggaaagtgttaaactgaaaacactcttttattaagctatgtttgcn

SEQ ID NO: 33 - DNA, 428 bp, Homo sapiens
actctcaaatattttccccactagtattactattaaatttttcaaacatgcaaaagatgaaagaattgctcagtgaacaccatgtacccaccacctagattctacaattaacattttaccctactttctttatcacatatatgtacctatccatctatccattcttccatgaatccatcaattcatctaattttttatatatttcaagttaagttgcagatatgtagcttatgtttcaccttaaatgtttctgcctggctattattaactggagtgcaatatgtttttggttcttctttatggtaaaatctatgttcagtgaaatgcacaagacttaggtatgccattaataggttttgacgaatagacaaaccttgtgtctgaaactgtaataaaaaaatcaaaccctaccttgctttcaaaaaaaa

SEQ ID NO: 34 - DNA, 507 bp, Homo sapiens
  SITE (391): n equals a,t,g, or c
  SITE (451): n equals a,t,g, or c
ctgtgaggtgaggcaggtgtctagattccctactcagcttacattaagtccaaaatgtggggacgctctttattactgcctggtggggatggaagtccattgacactgctgggagaaggaggttcatgctggccagttgggatgaaagtcttagctccccacttggtcttccctgacaccactgcagtggggtgttggggtgcccctttacagccttttgagtgtgggattctaggatccccacttgaccttycctggtgtgggcagaggttttttctttggtgtctgttgggagtagagcagctgtcatctaaaagttttctgtcttgctgggacgtcctgttctggtcctttagctagagagagcattcttttgtagtactttttttgnctgtgtctgttggcatttycatgttgctggctttttcaactccaactctgggatatatgntgtaaaaagaaaacccaggaaactcaccacagcgttggtttcttggattccaaaag

SEQ ID NO: 35 - DNA, 469 bp, Homo sapiens
  SITE (293): n equals a,t,g, or c
  SITE (452): n equals a,t,g, or c
  SITE (461): n equals a,t,g, or c
  SITE (463): n equals a,t,g, or c
cgtaccggtccggaattcccgggtcgacccacgcgtccggttgttttataaacatcatctttcaaaattcgagatttatggggaataaattaggagaaggtggttaaacctcttcaacaataaattgctctttggggacattttatgcacagaactgtgcaccctcctcagaacagcaggtctttaatggcccatgtgatgagaagggccccatcaaggcagcaggaatgggccactctcccacaccccatgggccaggccactgccactcctgctgccctgcatccccaggnttatggctgcatggtagaagtcacttctgtaagaaattcacctttctaaaataaagtatgctcttttttctgagacatctatagaataacttgtggcagagtgktttaaaaactgatttggattttttttatcctttaacccgtgtgaaaggatggaanggattttangnggaaga

SEQ ID NO: 36 - DNA, 515 bp, Homo sapiens
  SITE (440): n equals a,t,g, or c
  SITE (479): n equals a,t,g, or c
  SITE (489): n equals a,t,g, or c
  SITE (492): n equals a,t,g, or c
  SITE (506): n equals a,t,g, or c
gtagccttttgaggtgaaattcacataacatacaattaaccattgtaaaatgaacaattcagtggcgtgtaagagtatgtttacaatgttgagcaaccatcacctctgtctagttgcaaaatgttttcatcactccaaaagaaactcctttattcatcatagcccaaagttggaagtattttcttgattgggctcttgattacatggatgcatctgagtcattgaattgaagcctaagatgtgcttaatttcactgtgtgtaagtttcacctcagttaacaagagagaacagaacaaaccaaaaatcttaattcttttgaaaaaaagactttctggctgctttattaaagaagccaggggaacaaggttaaaaggaaatcagttagcagtgaccaaggcaagagawgatggtggcttggctgaagatggtgacagtggangtggtaaggtgatcagaattctgggatatatttttgaanggttgactanttngggccagcttgaangggccttaa

SEQ ID NO: 37 - DNA, 562 bp, Homo sapiens
acttctggccagccctttccccacctgggcgcgggagcgggtgccaggctttaaacaacctctcgatgggtcccacgaagatgtttccagacccttggaatgccaagttcaagtttagctatgtctcgcggagaggccggtggaagaagcaacgagaatgaagcaccccagttctctgctgagcacatgggcatctgcaataaagatttaatttcccagcttctcctgaagctcggtatggccacaacactaaattctgcccgaggagattaagcaaaatagtatgggacttccaagaaatgtttttaaagtcagrggcaggcctttcttcatgccttcttcctctttgctggctggaaygcaaagaccatggcaggaggccaagcagccatcctggaaggtgaaagcctcatactaaggacgtcagacagcgaaataagagcctgggtccttgaccctgtagacatctccctccccatcctggtctgtctgccttgactcctttcatatgagagaaataaacttttaacttgcgtaaammaraaaaaaaaaaaaaaaaaaa

SEQ ID NO: 38 - DNA, 316 bp, Homo sapiens
  SITE (43): n equals a,t,g, or c
acgcctgcaggtaccggtccggaattcccgggtcgacccacgnttccgaaagattgattcttgaacttgggaagaaagtagagcaaacaatccagtacaacagtgaactagaacaaaaggtaaatgaattaacaggaggactagaggagactttaaaagaaaaggatcaaaatgaccaaaaactagaaaaacttatggttcaaatgaaagttctctctgaagacaaagaagtattgtcagctgaagtgaagtctctttatgaggaaaacaataaactcagttcagaaaaaaaacagttgagtagggatttggaggt

SEQ ID NO: 39 - DNA, 413 bp, Homo sapiens
  SITE (19): n equals a,t,g, or c
  SITE (34): n equals a,t,g, or c
  SITE (410): n equals a,t,g, or c
  SITE (412): n equals a,t,g, or c
tctttgggattttggcaanctgccctaccggtcnggaattcccgggtcgacccacgcgtccgctcagcatagacggttttaggggctgctggtggtcagggacctgcactgtgtagagggagcctggctgtgtggcctggaacaagtccctccctccctgtgcgcctcaggtggcctgtctgtgagatgagaagaagaccagactgaagcctgttcaccatatgccaggcagtgctttctgcagacccccttgcagagaccttgtgatggagaattatacccatttgacagacgagggaactgtggctggtttcaagaagccatggaggccgggcacggtggctcacgcctgtaatcccagcactttgggaggctgaggcgggcggatcatgaggtcaagaagttgagancnt

SEQ ID NO: 40 - DNA, 238 bp, Homo sapiens
  SITE (132): n equals a,t,g, or c
  SITE (181): n equals a,t,g, or c
ggatttcacctgttctcagaaatttttagtaaatttaactaattgtacagccattaccataatccagctttaggacattttcttttttttcttttcttttcttttttttctttttttttttttttttgaagnggaatcttgctctgtggcccaggctggagtgcagtggcgcgatctcagntcactgcaacctccacctcctgggttcaagccgattctcttgccttggcctcccgag

SEQ ID NO: 41 - DNA, 361 bp, Homo sapiens
  SITE (310): n equals a,t,g, or c
gaacttggaagaatttgaatatacgatgggtattaaatartgttaacttgatttttaggtatgataatggcattgtacttaagcatatttttagagtcatttaaagtcatgatgcttttaaagaaatgtataatgacgtatttgtgggagaaaattcagtttgtctgggatgtgaaaatgttgaagggatagagtcaagaattatggcaaaacattgataatagttgaagctagtactgagtccttggaggatcattatactcctctcttttatgagatttgaaaaatttcaaaataatgtcttttaggngtgtgtagaagtgaggaataaaaaaggacatccttcccagaaacaaaatca

SEQ ID NO: 42 - DNA, 245 bp, Homo sapiens
  SITE (140): n equals a,t,g, or c
gaacggtaccaatggtattacgatgtgtcacttggcctgtggaagagagagactgagtctcaacccgagctgtcttgcataacactaatggcttacgttccgtagtttcactcttatgtgtagtttttatattccatcanggtgatcccttggggactacgctccttgaaacaaggaggacagtgtaagtatgtggtaaacatttggtaaatacggttaatactagttaacctatcccgaattac

SEQ ID NO: 43 - DNA, 402 bp, Homo sapiens
  SITE (376): n equals a,t,g, or c
  SITE (387): n equals a,t,g, or c
ggggcaaggtagtccaccaacaaaatgacaggcagtgtgatatagtggacaccctagccctcggtgcccttagttctgtgtgtggccctttcactaaattgctgtgtgaccttgagcaaatcgcctcccctttctggctttccttagctgtaaaagaaagggattggagcggaaagtctccagagaccttttaggttccaaagtagtacagtgacccacaaagtgagaaaacagtcttctaaaataccaagttattaatagtaaaatcaaatataaataatgtgaatatagttaatagctaatgttgttctcaatagaaatgtttcccacaagctgtggaattaaacatactaccacaaaaaaaaaaaaaaggggngcccgttttanaggatccaggtttac

SEQ ID NO: 44 - DNA, 456 bp, Homo sapiens
  SITE (372): n equals a,t,g, or c
  SITE (401): n equals a,t,g, or c
  SITE (447): n equals a,t,g, or c
  SITE (455): n equals a,t,g, or c
gtctggagcccgtggagtgattccttgaattagaattaccctgaccagctgcaatgtaaaatccctggaggtgtgtgctggcttatgaggggcacggagaaaaacaatctcaaagtgaaagaaccagttctgatgcctgccaagtctttgagaatcactaagagaaacacaccttgtggtgaaggttctcagacacaggatcacttccagacgagaatccataagcagctcgtggacctgctggccatcctggattgtgaggctgattgctctgttggaattgagctgcgagccgcgttgacatcaccattgcagatcttaaccaagtgtttaataaagtgattatcacttgcagaaccagcacagtggctnacacctgtatccagacttttgggcttgcntggaagatacttgagccaagaagtcaagcttgaatgactttaatgngccatggnt

SEQ ID NO: 45 - DNA, 783 bp, Homo sapiens
  SITE (631): n equals a,t,g, or c
  SITE (699): n equals a,t,g, or c
  SITE (729): n equals a,t,g, or c
  SITE (751): n equals a,t,g, or c
  SITE (758): n equals a,t,g, or c
  SITE (782): n equals a,t,g, or c
cgcaagtacaaatawttgagttcatgttggagagtgtcaagaaataggattagatatgtaagtatgggccagatcctaaaggggccagtcttctaagtgaaatgtggttagaacatgacagtgatggtgaagttcacccaaaataacctgggaataaggaacatatcttagtcctatgggaacagactttgaaattaaaatggttgtgataagacatctgaaaagtcaccctatgaagtagcaaggcagttaatccccaagacaaggtacacttgactgtggcaaatctgtctcattaacaggaggagaaaacatattaggggtgggagtaatggtctgcagtgtagcagacacagataaaaggagagtcagaaagaactgtctgccattgaaattcttataccgtcctttttgagtattaagattcctttttaatgccaaagtttttatttaccttctccctgtaaacacatagtagtagtaaaaagtttagtatcagttcattgaggaaatgcaaatgtacaaaccaattctgcatcctttggtataatcccgaggatctgtagcttagtttatagcaagttgctttcacctttttgccaggagtcacagttgagaaaacaatttacgntatgacctagtaatgatcacacagtttctcaaaacagaacttaccccactatggccatactctaatantttctatgctaggttttttttttttttttncaaaatcgggtttttacccacnaggggtnattccccggggttggaccctggant

SEQ ID NO: 46 - DNA, 673 bp, Homo sapiens
gagcaggagcaacagaaagccaggattcctcgatggagcaaatagatagaaataactttgaaatgagtttgttgcctacaacatgcctttctccaactggaagaaggtgtgggtcctgtcagaaaactccagagcccgtaatcaaagcgaaggatctatcagcccagcaagtgccagcttcactaaacaaaacctccctgaaagaaatctcaggggaaaggctgagctcgatccccgaagcatctgaatatgactggcgaaactatcagccaagccagatgagtgaatccgagttacagatgctagcaagcctacggtggcaacaaaatgaagaactggaggatgctgggacctcccatggcctgagtgcctcccaggtggacaactgtaatgtcagcataagtaccagcagtgacgacacaaccacctggaactcctgcctgccaccccctgtcaaccagggtcgccactatcagaaagaaatgaacccaccttctccttctaatccccgggactggttaaatatgttgagcccaccaatcgttcctcccagtcaacagccggctgagcagcgtccagattcctgtgaaagtttgagtgttcaaggtgggactatgaaaaacgatatgcataagaaaataaaaataatttactataaatagagagaaaaaaa

SEQ ID NO: 47 - DNA, 493 bp, Homo sapiens
  SITE (478): n equals a,t,g, or c
agagtgctgtggttgattagcaatgtctgccttgggtgaggaaaggggaacactcctcaagtgcctcctactgtcatctccattcagcctagcaccacatccccatgtagaagtgttgtcttctactgcttgccacgtacaagtgtgaaatgccaaggtgagactcgtacacttggggatttgcaatggtttttacccctcatgaaggtcagaggtggactatttgtacacatacacacatgcacaccctctcacgtcctccagaggctgaaagaccatcagcatcttggtaactgccatgcatgagcagcaaggacagccttccataatccatgccccatttcctctggaagcctggaaacttttcatttcctgttccttgctaattaacatctaaacatgcttctcatttccagccattgctgatgcttctcagttgaagtttgagccacatccctcttacagctagtgaatgagntggtagcagatactg

SEQ ID NO: 48 - DNA, 956 bp, Homo sapiens
  SITE (47): n equals a,t,g, or c
  SITE (307): n equals a,t,g, or c
ctcgcgcctcgaccatgcacccctgcatcttcctgctgggccacagngacgcgctttatttctggagctgagggctaaaacttttttgacttttcttctcctcaacatctgaatcatgccatgtgcccagaggagctggcttgcaaacctttccgtggtggctcagctccttaactttggggcgctttgctatgggagacagcctcagccaggcccggttcgcttcccggacaggaggcaagagcattttatcaagggcctgccagaataccacgtggtgggtccagtccgagtagatgccagtggnattttttgtcatatggcttgcactatcccatcacgaagcagcaggaggaagagagatttggatggctcagaggactgggtgtactacagaatttctcacgaggagaaggacctgttttttaacttgacggtcaatcaaggatttctttccaatagctacatcatggagaagagatatgggaacctctcccatgttaagatgatggcttcctctgcccccctctgccatctcagtggcacggttctacagcagggcaccakagttgggacggcagccctcagtgcctgccatggactgactggatttttccaactaccacatggagactttttcattgaacccgtgaagaagcatccactggttgagggagggtaccacccgcacatcgtttacaggaggcagaaagttccagaaaccaaggagccaacctgtggattaaagggtattgtgactcacatgtcctcctgggttgaagaatctgttttgttcttttggwagttttaytaaaacatgacctattcttactcaagtctcttatctcctctgtattcttttttttttaatatcttcatgacattcaaatctcttctgtattctcttgccagaaagtgtacattctttttgcttgtataaaccctttcacttgtca

SEQ ID NO: 49 - DNA, 416 bp, Homo sapiens
  SITE (369): n equals a,t,g, or c
gtttttcttgcctcccagtgtgacttgtaatttttaattgaaagctggatatgatgtatttggcaatgggaagtgagggaaatatgtttttagtgtgagggtttatgttaatctttctcagagttgggctgtttaatgttttgctgtggtctgaatgttccttaaaacttgtgtgttgaaacttaattattattgtcatggtattaagaggtggggcctttgggaagtgattaagacatgaaggctccacattcatgagtggattcatgctttttaaaaggactgggaggaaagtagtgtaggctatttttttgcccttgtgccttccaccatgtgaaggatataggcattagcccctcctgccatgtnaaagactcagggaagaaggccctcagctgggacagggtgggtgcagg

SEQ ID NO: 50 - DNA, 446 bp, Homo sapiens
tctatgaaataggttttttctctagtttacaaatgaccatgaaaataggttttatttgkgttttatctgctttattttttgatgcttaracaacagttagacttactgagctcctaaaaaaacgaggaaraagtccttatttgkgaaaagcactttatgagtaattgtatagacagtatgkggctgcgtcactgatcatcttgtaagggtgtaacagtcttgtctgtaaagtggctgcagtgccttctgtagtgtgttttatttttggtagggagaggtgaagccttctgaaaaatttgagagcaactacagaggattgtttgtaactgtgtagtattcctgatggacttttttcatcgttagagtcaaggacctagacttttgccactgaaataatattgaccaaaaaaatagtttataaaagggatttgtgaatagaaaattca

SEQ ID NO: 51 - DNA, 480 bp, Homo sapiens
aagaaagtcaaacctactttacagtaaaatacttggtaagtgagttagaaaaatgatctttttctcagtgagaagtgctattctgtggcattttgaaaaataatcttacttctgctccactgaagaaatctggttattaaaagagttattccttttataaaatcaaaatctgcatgtggcaatttttattcattgatatggctctcttctcaaaacacaaagaacaaatctaacttttcactcaaaaattaatcttaaagacacaatttatgctcttcctgtaagcagcctgagatgatctcttaaaatggtttactattcacttgacccagaacaacccaaaaaatcattcaaatcaagagattgaaatcttcgtgttcactttaagaacatccatgaagctacccaggcaatcaagggttatgtaaatctgaaaagcccccaagtatctgaaagatgtgactttacagaagcagtgtg

SEQ ID NO: 52 - DNA, 1066 bp, Homo sapiens
agcactagtggaaagaaacagttcagagaggaatatgggaaaggaaaaaaaaaaaccaaaatgtgatttccaacgagactagagatttgttctttatctacatggtcatgttactcatttgatagcatctatctcaggggtattatgttatctcttggccaggactcatgaaagttaagatttgctttgataggaaaagttttgcagaaatatggactcttgagagggtgggaggtatataaaagtggctatggctgtgcagcagagcaatttgcatttcttatacaccctgcttgagactgatgtcattagtgttggttaggccaaggctggggggaggctactcagaatagtgggtgaccaattacccagaaccttttggaaaaggaaatgacttgattgaagaggccattctttaaatgtatcttactgctcaatttcaccattgcctattgtagaatgcgcsctgcccgctcagcatttgcctctaggaggaccaggactccttcccctccccaactaatcttccttctcctgtatcttattccctagggccacttgcacctttcaaaatggataaattaaattcccctgctccccttctaccaactttaacatcatatccttggtgtatgatgccctacttttcattgttttgcctaaataagagtatgcttgggaattttaggcttagggctgggaaaagatgggatatggaatcgtcagctatagattgccggacaagaaattttaggagcagtagacctttcaaccgccctcaataggatggaactgactgtccccacaacctatttccctttcagtggcttgctccagccaaggccccttatttaagagatctttgtgcgctctgaaaaccatgcatatgccagaactaggtgctctgtttcatgaaggcagtttgataactgaatggactttggaagtgcccagtgtttgactattaccctggtgcgatgatcacactgggcgtatcattgtcacatgatcccatgtttgttgatgaaaataaacagtggttttcaaaaaccaaaaaaaaaaaaaa

SEQ ID NO: 53 - DNA, 679 bp, Homo sapiens
  SITE (591): n equals a,t,g, or c
  SITE (636): n equals a,t,g, or c
  SITE (657): n equals a,t,g, or c
  SITE (666): n equals a,t,g, or c
caaaaagtcacttcatgtgaggttgctgaagcaccattcagcatctggatcctgattctccttttaagctaaaatctcatcaaggcttcaataagaagatggatatggatatatagtatattctactcctgtaaggaaaatggtatttggaattccgaattgacaggttatctggaacaaaggagcttctttttttttctaggttttgcaggcatgaaatagtgattatatctgtggaaaagcataggaaggcattctcctttttcatttttttcctttggctggcagctcttcccagtgatgttgagagcacctgcagcaatctggtccccagtcgcacaacttcccacatacccagaggagagcatatgcctgtgggggcagtgctgatggcatccagagtcattgctgtggctgagctggaaggaaatcaccaggtgccaccgtcaatatttatcagctttcagcactggttttgttagacagtcagggtgtattatttcaagagcttcaataaaaaaagtgtttgcaggtatttgtcatattycttagtatgcaataatgctatctatcctttttagtgctaattcncaggtttctcagtcaaccagctagaagcatgtgatgcatgtcaancctcactttttttttcaatcnggaattccngggaatttgacaa

SEQ ID NO: 54 - DNA, 505 bp, Homo sapiens
tttttttttttttttcagaggkgaatatttatttaattcatatataaattttacataatattcatggtgctataaatataggcacattttttaaaagtccagatacatccaaaaattaccccctcactgtagcctactccaatcccctcaagacggaatatctaacgtgtttggaaaacagggtccagaaaggccctgmccattaattttaaaactttctgaccatcaagaccattctttcctgcttcaaccaagcagagtcaacaaggatcatgtgttttcagggttttaattgcactagttgatgaattaagtaaatgcctctgcctgggtagtttgtaataggtttatggtttggtttctcctacttagttcaagtcagagaaagaaaaaccaatatctatattcctattggccttctttaaatccctatgagatggcttaaaaggatgtcactgcaccagaggactcacttaaccacatctactgacaaataggcaacttc

SEQ ID NO: 55 - DNA, 535 bp, Homo sapiens
  SITE (434): n equals a,t,g, or c
  SITE (485): n equals a,t,g, or c
  SITE (496): n equals a,t,g, or c
  SITE (515): n equals a,t,g, or c
  SITE (528): n equals a,t,g, or c
ggggtgagattcaggctcaggtctaggggttggggaatattaaagtttacaagtacaatcttactccatccatacacacacatggagaagccaggagaggacgcggccagagatgggctcctgcccttkaacccctgtggggtggaagcaggtgcacaatgcttctttgagtatctccgtgtctgtggctgatatccaratgcaaggcttyttccgggcatccctgggaatgggagkgcataracatactggtcaaattacagcmcagcctctacmcctttactgaagatggaaaactgttttccaaagttgacttgcctaacatgatgtaactatcatgcaaaaataaaaataaaattaagaataaaaatttaaaaaaaaaaaaaaaggggcggccgctctagaggatccaagcttacgtacgcgtgcatgcnacgtcatagctctttctatagggcacctaaattcaattacttggccgtcgntttacaacgtntgactgggaaaaccttggngtacccacttaancgcttgc

SEQ ID NO: 56 - DNA, 539 bp, Homo sapiens
caaatgctatcatgaacgtaggaaacttgatttttttgttttgatcatggcctctacatgcacctttccagagtggtctcttctcaggccctttttagtccctttccaaagctgcccccaccaccctgctcctctggcctcagtgcacagtggcccccagcctcggccaggcctgctctgctcagcgcccaccgcccaccacccctcctgcttccccgagcctgaccctgttccgcccactggcaatcagggctgcgcacttccctgtccacggtccccaggccttcctgtcttgtcccttttgatcattattaactcagggtttcagctccaacctcgctgagttggtgcagctccaggtcattcctggggtgggaatcggatcatccctgactcagcttttaccttaattttatttgcagaggattcttttctcaaaatgctctggcatttggacacacatcacatgtcgatatttgcataggagtcattttcagtggaataacatttttaatgtgtggctctacccgggggggggg

SEQ ID NO: 57 - DNA, 594 bp, Homo sapiens
cgcttctatacaagagcacaccagagtctccacaccactgctaaagtaaaacatccaaactttttgtatttggttggctatttctgaaactttttttttttttaaggaatatctgtccaaggggtatggtttgttatggtcgtgtcatagatactggagaaggagcgatttgtgggtagtgtctcatggtacagtggaaacagctcagtcacagggtgtgaatttgagtcctggctctgctttgtgactgggcttgagaactctgggctgacctataaaaacctgacattgggggttgaattaaaccagtgggtttgtccccatgagaagtcatggctaaactatgcatagaaaacgactggaaagaaacattaacagtgactatctttgcacagtggaacaggagtatgttttattcacctctttatactttcaaaaatattttaaagcagtttctaaaatagcccttaaaatcaagaacaaaagtgttattgaaacaagcaaaaatatcttgaaccatgctatacctaatgggtttgcatctgctgtggctgaggtttccccagcagagtwtggtacatgrcagcaccaggc

SEQ ID NO: 58 - DNA, 469 bp, Homo sapiens
  SITE (466): n equals a,t,g, or c
  SITE (468): n equals a,t,g, or c
ggttttttttccccacttgaatcatgtatactgaaaacccatttcctcagcaactacacaaaataagagaaagggaagtgctatattccagatacaaatgactcaaaggcagctcagttgtactggttttgaaaactcaaggattttataaataaaaatatttaagtatttccagttatgtaaacactctaaaattctataattttttggaaaaaaaaagctatagctttattgtttttacattcacctttataatgtcwktctgtttcaacacaatgaaggtatatggaatgtgcaatttacaaacctaaaatatatgtgccaaaaattaacgcttttttgttagtactaattacttcatggacacaaacaagataaaggaaatataaagcattactgttgctacattttcctttgtaatcacytcygtttttawtmcatwaaggaatgtaaawttcaaaaaaanana

SEQ ID NO: 59 - DNA, 629 bp, Homo sapiens
tttttttttttaactttgtatcaaatgtattttcagcaagacttgaagatttgacacaggcacagggaaaaggaacaaacttaaaaagagtataaataaggtcagttcaaactcacttctatttgaaatgtgttttaaaaacaattttagtcttatattttaaaaatatgattgagaatttttttttctttaattcaagtcttctcaatcatcttaaaatacttgtgagctgaactgatacattaaggcaaatttttattttaaatactcatttcattgatgaactctgtttcatttaaactgctaatccagggagaaagttttcgtaaaaaacattttattgctacaaagggaaacatggtcacaaagagcctttaagcgtatcttaacgcaaattactattcaatgtctaatgcagtaaaaaaatacacagagcacaaaatacttgcccagtttatatcttccagggtaagtattcaaaaaattgatgcacacttgaatattcactcccaagagcagcatttaagataaaatgattagaatagatatactaacaatacacatttgttatccttaacaccaataaagtaataaaaattaagcttaaaaattatacaaacaatttatcc

SEQ ID NO: 60 - DNA, 251 bp, Homo sapiens
tgtggaaaccaagcaaacgtgttgtgcatcagccggcttgagtttgttcaatatcaaagctgaaaactagcgaggtctgctgtactgcttattgaagtattgtgattattttaggcattgattcttacaaaatatatactgtaacagtatactttgtacagatttaaattttatttgaaaaaatgaaataaagtaggcaaaaaaataaaaaaaaaaaaaaaaaaaaaaaaaaaaaaaaaaaaaaagggggg

SEQ ID NO: 61 - DNA, 438 bp, Homo sapiens
  SITE (416): n equals a,t,g, or c
  SITE (438): n equals a,t,g, or c
tataacgctctctgagaatgctagactgactaaatcgtcatttttgccttcatccgtggataagccacatactgtatgactgcatttataggaaatatttaaaatagtcaaatctacggaaaaggagtaagttagagttttttaggactagcaggattagggggaactgtgagtgattggtaatagctaaagggttcatttttggggtaatgcaaagcttcttgaattagataatgatgtttgcacaactctgaatacactaaaagtgactgaatggtacaccataaacgagctaatgttatagtttgtaaattatatttgtgtgcatgttttttaaaaatcaactttactgaagaataatttagatacaataaaatgcactcattttaagtgaaaaaaaaaaaaaaaaaaaaaanaaaaaaaaaaaaaaaaaaaaan

SEQ ID NO: 62 - DNA, 606 bp, Homo sapiens
  SITE (9): n equals a,t,g, or c
  SITE (31): n equals a,t,g, or c
  SITE (77): n equals a,t,g, or c
  SITE (536): n equals a,t,g, or c
  SITE (570): n equals a,t,g, or c
  SITE (586): n equals a,t,g, or c
ggtaatacnactcactattgggaaagctggnacgcctgcaggtaccggtccggaattcccgggtcgacccacgcgtncgcccacgcgtccgcttcactcaggaagagtggtatctgctggaccctgctcagaagattctatacagagatgtgatcctggaaaattatagcaatcttgtctcagtagggtattgcattactaaaccagaagtgatctttaagatcgagcaaggagaagagccctggatattagaaaaaggattcccaagccagtgccacccagaaaggaaatggaaagttgatgacgtgttagagagcagccaggaaaatgaagatgaccatttttgggagcytctattccacaacaacaaaacatggaatctgaagcttataaaagttgaatgacagcagcattaaacatatatgtgaagagtccccgatgtttgtagaccttatcattgagaactgatgtgccttcacaggaaacttggcccgtgtgtttccaggattcttgatgtttcttctgagctccatggncaggcagtatgattgaagtttctaagccagcatncttggaataaaagtancttttgaggtataaggagta

SEQ ID NO: 63 - DNA, 572 bp, Homo sapiens
  SITE (27): n equals a,t,g, or c
gaatctacttccaccctcagaacttanaatgaactgcatcctttttttcatcttcttttcttctccagtgaatatgatctccaaacccttattttttctttgaactgtaaaatttccactcatggacgatgcaaccaacagatgcaatctctgagaagatgaaaattgggacctcttattataaaattgacctagctggactcaggaaaccagggaagaagtcaatgcaggcatttaaaatgtaaagttttttctggttaaatctatttatttttcttgtaggttgagtatttcttcccagtttttctgctctggtgtataacaaacaggtcaaaatttcccatctttcctcctgatagtagttgaatcctaccttgcatacttaatgcatagtgaaatggcatctagcagaaatacacacccccaaaacacaccaccatttcattaggtgcccaaaaaattctgtatttagcttatttatttattgttatttttgctttttcttaacccactatatattgactgcaaacgaattaataaattatcccttytggaaaaaaaaaaaaaaaaaa

SEQ ID NO: 64 - DNA, 650 bp, Homo sapiens
tttttttttttttttttttttttttgagaagaataaggtactttattcttctgtggcagggaacccaacacttgggtttacgttgcagggcaacacctgtgatgaacaaaacacatggtagcgatagcccattcatgaaaaagcccattcatgaaaaactaacagctattcttttcacagggatagtcaaaaaatgagttgaagggaaaaaagtatctccagttggagccaaaacagccatctctagtttgaaaatacactcaacaaaatgttggtgattagagataacaggaaccgggcaagggaggaatttttacatacgttcaagcttttcactttgcagccacactctgattttatcaaaattcttatccatccaaccgatgttttcttcaatggtttcaattgtctgttggacacaacggagctgagaaccattttctttcaaagagctgaagaatccttttacctcttcaagccgtgttcttgtggagaattgatttgttgtacccattaccatgtgggctatggaagatgagccaagttcaaacttttgtacaagtttgttycagttttttcctmagaaattgccaggccagtgggtatcctactkggttcctgccaatgagtgtaagaatttgtgaaacttc

SEQ ID NO: 65 - DNA, 401 bp, Homo sapiens
  SITE (397): n equals a,t,g, or c
taaagactactggcatacaatcaaagttgttccataaaagaatataactgagcaatgtatttctctaaatgacttgtaaaaatcaatgaattatgtttaagtctgcattatggtaggttattactcccagctcattttaaagacaagtttgaaagagtcctttaaattttataagcttgtagattccataaactacactgatttatacatttgaaagaatttagccatttaataaatttcttattctcaaattgcatttagattaaaattccttttaagagtgtctgaaatgtctgcctgcgaagaacatgtaaacattgccagataccagtcattattctttagtggctttttagtcctctgctttttttttaaggcaaaagaratatgcatctancatt

SEQ ID NO: 66 - DNA, 500 bp, Homo sapiens
  SITE (475): n equals a,t,g, or c
  SITE (479): n equals a,t,g, or c
  SITE (481): n equals a,t,g, or c
taatagttctaatctggcagttcttataatctacctgttgattcttttagatttattatatagaaaatcgttatgttctcccatagttttgtctgcttcttttaaacctaatgttctatataatacttgatttattgcattgaataggttttctattcagtgttaaatagcaggcaccttttcttgttcctgattttagtggggaatacacctataatattacaaataagtataatatttactatagttttttaggcgtrgatcttttagttttacagkttatctgccccatgtcagtattaccctgaatttaaggtttccccattaatagttttactcaaatcagratcmtgtatgaaattgaaaaacatatatacatctggctagagttccagatattctgatatctggagtctaggcatttgtatttttaaaaagcattgtgcttaactatttaaccatgggtagggatccnattngnatgcagtaaacccagtgtg

SEQ ID NO: 67 - DNA, 421 bp, Homo sapiens
  SITE (1): n equals a,t,g, or c
  SITE (6): n equals a,t,g, or c
  SITE (12): n equals a,t,g, or c
nacgcnagcctnactaaagggaacaaaagctggagctccaccgcggtggcggccgctctagaactagtggatcccccgggctgcaggaattcggcacgagactgacaaaattctgccggtggagacagataaaaagcctcaggggaagcagctacagacccgagcggattacttgttgaagctgctcagaaagggtctggagaagaagggggctgtgacaggtggggaagaggccaaattaaagaagcggaagcctcgggtaaagaaggaaaacaaagtgcccaggctgaaagaggagcatggaattgagctttcatctcctaggcattcagataatccatcagaagagggagaagtgaaaatgatggcttggaaaaaagtccaatgaaaaaaaaamaraaraaraaagaggaacaaggag

SEQ ID NO: 68 - DNA, 476 bp, Homo sapiens
  SITE (2): n equals a,t,g, or c
antttcgagtttttttttttttttttttttatggatgyaaaataaactttattgtcagaggtttctaaaggctcatccttcaaggaaaatggacatatgctgaagagctgataaactgtctacagcagtgttattctaacctaatcttgattccaagttcttgccattttcctccagctrctgttgactccagttatatataggatgggggaaaggggattatctaygaatgtaggcatcactttctcttgggcmgttatcacattggcagactgaagggawgtgatttctacaatcaaactatccatttggagtacaaatctggagtggctgtaaaattcggttctcagagatgaacttgcagattcggactttcaattgttctgktgttttagtttttctyatcaactggggaactgtttgtgactaagctttgttaaaagtagagaagagcttttcatagttccaacattagt

SEQ ID NO: 69 - DNA, 547 bp, Homo sapiens
gcacaagaattgcttgaatccaggaggccggaggttgcagtgagctgagattgtgccacggcattccagcctgggtgacagcaagaccctgtctccaaaaacaaaacaaaaccaaaaaactcacagctttgaagtaagacgtaacgggatgaacgggatgttttctaaacttggtgaaacgtataaatctacaaattcataaagctccagaaagcccaaccaggatgtgtgtccagaaatccctgtctaggcttgtcattgtcaaactgctgaaaagcagcagtaaagagaatctttaaggcagccagagaaaaaaggatccatgacatacaaggggacactcatgggaatcaccacagccgccctgtcagaaaccatggggttcaggacacagtggatcacatcttcgaagatctgggctgggaggaattaacccagaattctgtgtgcagcagaaatattcttcaagagtgtaagtgtaataaggagagttcagacagaatccaagagcatttgtcgtcagcagagcccctcctattagaaatgc

SEQ ID NO: 70 - DNA, 670 bp, Homo sapiens
gcggccgcgtcgacttttttttttttttcaagaaatggtarctacttttattaccagcaggccgttagtttcacagaggaagaacagtttctacaggtggtgatctagtctccggttccacctttcactcttttctgtggccttgggcaaatcatttaatctgtctttgaagctatttcccacattcataaactacgtgggcaagtgaaaataattcaacccttttttcccaaatagaaaaatacttaagattttagcactgatccatcagagaagccacactggaaaacctatgcagaaactaaaacttggtaccattcactatcctcaagtttatagaattaaaaagtaacagacgtaataggtataaatactcagaaaacatgaacatgtctcatgtcaaataagaacagraagttggtgkgtaaaaaatgkggrttagctgtcaatatataaaacacagaatactgtttttaaaaagaattgtttatttaccgaacctggggcatattagatacaaccaattttaaatttacatcttttaaatcagttttgaagtgtttcacacacacaaaaaacttggcatgcaacagttgtcctaaggtgaaagtcacctcattaataaactgttgcaagtgttctcacccaaggtggaagtatggtttatccc

SEQ ID NO: 71 - DNA, 124 bp, Homo sapiens
  SITE (122): n equals a,t,g, or c
gtaaaaatatacattccattaatcttatatcctctccctaaccactaaaatgcaaatgaaaatatttatataagacgtatacggcaccttcttcaaatgcttccttttcaagaaggtgccgnat

SEQ ID NO: 72 - DNA, 811 bp, Homo sapiens
  SITE (2): n equals a,t,g, or c
  SITE (4): n equals a,t,g, or c
  SITE (790): n equals a,t,g, or c
  SITE (801): n equals a,t,g, or c
antngatacgccaactctaatacgactcactatagggaaagctggtacgcctgcaggtaccggtccggaattcccgggtcgacccacgcgtccgccaagtgcggggctgtgctctgcccyycagccccctgccagcaccccacccagccccctggtgcctgctgccccagctgtgacagctgcacctaccacagccaagtgtatgccaatgggcagaacttcacggatgcagacagcccttgccatgcctgccactgtcaggatggaactgtgacatgctccttggttgactgccctcccacgacctgtgccaggccccagagtggaccaggccagtgttgccccaggtgcccagactgcatcctggaggaagaggtgtttgtggacggcgagagcttctcccacccccgagacccctgccaggagtgccgatgccaggaaggccatgcccactgccagcctcgcccctgccccagggccccctgtgcccacccgctgcctgggacctgctgcccgaacgactgcagcggctgtgcctttggcgggaaagagtaccccagcggagcggacttcccccacccctctgacccctgccgtctgtgtcgctgtctgagcggcaacgtgcagtgcctgcccgccgctgcgtgccgctgccttgtccaragcctgtcctgctgccgggagagtgctgcccgsaatggcccaagccgcccagcccccggccggctgcccacgggcccgggcgcgggccaacggcccggccaccaaggaagtaccttttttccccggncccgggcgatncccttggccg

SEQ ID NO: 73 - DNA, 762 bp, Homo sapiens
gagaaaagcgatgctgcttgtcagacattgctgtctcttcctgtggattttaattkagaaaatatattaggtgactattttagagctgatgaatttgcagatcaatctcctggaaacctcagttcttcatccctcagaagaaagctgtttttagatgggaacggaagcatctccgactccttaccttcggcttctcccggaagtcctcacagtggtgttcaaacatcactagagatgttttattcaatagattkgtctcctgtaaagtgtaggagccccttgcagacaccaagttcggggcagttttcttctagccctattcaggctagtgcaaaaaaatacagcttgggaagcataactagtccttcgcctatttcttcacccactttctcaccaattgaatttcagataggagagactccactctcaggtatgtctcataataaaatacctagttaaaagttttatactatcaatatttgttattagagaggttcttttaatttgtcttaatgatagagctcaaaatgatcactaaccttctaacatttaggaactttgatttttaaataaaagaacagtttaccttcaaaggctggaattctcaccagtttgtactgtagtgttaaatatagttactttaattagcaatatttacatcaaacactatcaaaggaaatttagcaatttccatttgtgctattgtttttgacatcacaatttcactttggtaaacaacacaactgttacagaaatgcagtt

SEQ ID NO: 74 - DNA, 615 bp, Homo sapiens
  SITE (4): n equals a,t,g, or c
  SITE (40): n equals a,t,g, or c
  SITE (556): n equals a,t,g, or c
  SITE (576): n equals a,t,g, or c
  SITE (586): n equals a,t,g, or c
  SITE (614): n equals a,t,g, or c
gttnacgcgtccgcccacgcgtccgccagttcatgctggncgaagaaggttacagtgtaactattttggtactagaaccagttcatgctggccgaaacgacaatggtttatggacttgcatccattttgtatttttgtaatatttgtaaatatgaactttttaaattgctgcaaagatggtttcttttgtaagatgttttcaacgtttacattcaatccaagcctttgtatattttagagctgtgcaacactttaagtcttgtatttatttttagtaaaaatggtgacagtttcattgtgaacccctctcaaaaaaaatgtatcagaaaagtttgattacctagaaagtgtgtatagaaactgcaaataaacgtgactgcaattaaaaaaaaaaaaaaaaaaaaaagggcggccgctctagaggatccaagcttacgtacgcgtgcatgcgacgtcatagctcttctatagggtcacctaaattcaattcactggccgtcgttttacaacgtcgtgactgggaaaaccctggcgttacccaacttaatcgccttgnaagaacatcccccttttcgncagcttggcntaatagcgaaaaaggccccgtacccgang

SEQ ID NO: 75 - DNA, 683 bp, Homo sapiens
  SITE (677): n equals a,t,g, or c
ttttttttttctgcacaaaacaaatatttattttacaaaatattgttttttgcttttccagtgcagcaagcttaaacttccttaaaaacaaacctctgggaagaggaaaatgaggcaagatgctgagaaaaagtcatctcccactctgcccttctctggcaaatcgaagtgtcctcttgtgggaggcggtgggcagcgacactcccgttggacgtcagtgctctcgggcccggccaccccggagcagaactcacttagggcctggtgcccctgtgcccagttctcagaatgtcggagtgctcagttctcagaacgccggagtgccccattcataacctgcagccccgttcatagccacaggcagggtctgctggtttcggtgtcaggggcacatccccaggaccacgtctgagatgggaagtgccttgatggaaaactgatacctttttctttccgagtaactttagaacatgtcgcttcaaatataacatatcctgatttcagtggacttgcatggaaggaaacgcaagttcatttgccagtgggggatgaggactgggagagtggggagcagggtggggaagaggggascattccacaagcygcaagagcctggacacctccagccttcaataaatagcatttgaatttgctgtgcctaaaaaaaaaaaaaaaanaaaaaa

SEQ ID NO: 76 - DNA, 451 bp, Homo sapiens
  SITE (12): n equals a,t,g, or c
  SITE (23): n equals a,t,g, or c
  SITE (431): n equals a,t,g, or c
  SITE (443): n equals a,t,g, or c
cctccctatagngaaagctggtncgcctgctggtaccggtccggaattcccgggtcgacccacgcgtccgcccacgcgtccgcaataattcttttcacagagttggcatcttgggggagcctcgatgtctattcaacccacatacgcttcacccccttgatccagaagaaaacacaaaatcatttgggagatatccttccttgatggaaaacaataacatgaggattcaggatacactggacttggtcatgaaaacactgtcctctcatacatcatgccctaagtaacctggtacattccatatctcaagtaaactactttgactttataaaaaaaaaaaaaaaaaaaaaaaaaaaaaaaaaaaaaaaaaaaaaaaaaaaaaaaaaaaaaaaaaaaaaaaaaaaaaaaaaaaaaaaaaaaaaaaaaggggnggccgttttaanggatccaa

SEQ ID NO: 77 - DNA, 747 bp, Homo sapiens
  SITE (726): n equals a,t,g, or c
aaatcatgtctcttcattttataataccccaatacataaataaccttgtacattttcctaattatattaaacattgatattaaaagttaccattgcttaactataaagatgccccataatcacagaactctaaaatatttgcttctctctttataggccttacttttatcaaatgtttctcgacaaaagttttccactggggaaattattaacttgatgtcagcaactcatggacttgacagcaaacctcaatctcctctggtctgccccttttcaaatcctaatggccgtatatctcctttggcaagagctgggtccagcagtgttagcaggggtggcagtccttgtgtttgttataccaataaatgctttagctgcaactaaaataaaaaagttaaaggtgtccctggcaaccttgtgtgtctatttcttactggatgaaggaaacattttaacagccactaaagtgttcacatcgatgtctttgtttaatattttaaggattcctctgtttgagttaccaaccgtgatctcagctgtggtccagacaaagatatccctgggccgtttggaagactttctcaacactgaggagcttcttcctcaaagtattgaaacgaactatacaggagatcatgctattgggtttacagatgcttctttctcctgggataaaacaggaatgccagttctaaaagaggctctgtggcttatgkttctcaacangcctggattcaaaattgccgg

SEQ ID NO: 78 - DNA, 449 bp, Homo sapiens
tatatctagaaatcaacttttagcctattcttactgacctagagaataataagctctttaaatgacacccttaatgaaaactgtcacataattttcctctaaagtcagcgatattttttaacaatcatattctttatagaattcctaaatctgggtttttgaaaaaagaaactagtgaccatttaaaattgttggctctattcccactgcttctagtggactagcctgaaaaaaatatttttccatgtctgcgtatattttataccttatataatgtcctctctgaaatcatggaggaatttaagaaggagaaaattgataatcatacttacttagtttctttggaatatttgcatttagacacaacatcagtagcrgaagcaagacacaacccagcmtakgggarggaartgttggtgggctgactggcmgtttgagtgcaagtggaa

SEQ ID NO: 79 - DNA, 830 bp, Homo sapiens
  SITE (712): n equals a,t,g, or c
  SITE (761): n equals a,t,g, or c
  SITE (825): n equals a,t,g, or c
ctaacaaataaacatttaaataagttcaaaataaaacatcttactataaaacaaacgaacacattttrttttgtaagaatttaatgtgtaaataaatacagaaaaacaagcattacagcaaccagttttgctcatgatagcaattttaaagacacttcaacaaatacttttatgtaagaggctaattctgcaaaataayattcactttcctatggaataatttcacagtcccagattttaagccagaaaaatgagactcatgctggtaaagcaacctgcaaatcctgcttgttcttgcaactagtatactttaacattgtaaaaggatctttcaaagggggaaagaaggctcttaacggtacctcccagagtaaatccttgccccaagggctgccctgctatctgcaagactaaaatggtcatgacaaattcaaagctaaaaaaagaaataacctttatcttcagtgtatttgcctggttcaagtggttatctgcagatttataagtaggtaaatagaacaatattgataagatttctgaaaactaaattgtatttggctctggtaytaaggagttgagagaataaaacacctatgttaattatcaaccgcaaatgacaactttttgtgaggtttctattctaaggcttactttattcgtgtattccatttagaatcttaaaattttttgacaacttcctttaaacaagaantaattcacaaatggttaacacagcactaaactaataagataagtcctcncacccatcttgaattatttaagaaagtattgccattgaaacatctttttcctgagaaattcatnttgca

SEQ ID NO: 80 - DNA, 497 bp, Homo sapiens
gtctttctttgtgccttgatgttgagagcgcctctcttttgagcaaacaagcattctatatgcaaccagagtagaggggacctgctcagcaggtgtgaccagggttctctgaatctgttattgtttttgcttctggaaagttcatttggggtttacaacaactaggatgtgttgggtgagatgtttcagatctggagaaatgagcaggtgtcgggaaatgtgtgacttaaccgtggtgagggctggaaatccaaactcaccaccatgacctgtggcatcaggcttctcccagtacaggagggtgccatcccccagcatgcggcttctctgccattagcagccctgggcgggccgaccacactcgaggctgcggtgctacgggcttagcctcgcctccctcactgggagcttccccatcctccctgccttccccagtgggaagttagggaagctcaggagcctgggaccccgcatgtcccaaaatgggattggagaag

SEQ ID NO: 81 - DNA, 664 bp, Homo sapiens
ctcaggcctgtaccaacggcagaaagaccccaaatggtagaaaacagctgctgaaccccttgtgctcttgtcctcactgaggggctgaagtagctcttagagctagaggggtgttagaggtaaccccgctccagaggactgactgtagcccaaggcaagagagggagtttcctgaggaaggacccagatggtgacctcagggtgggtgaaggaggtattctttgaatttctcttggagttgggagacttgatattgtccgacctaatctgcagtgctgaatcctgtcccacaactaagggggaccaattctcatgtccttgatcctctttgaagcaccttgggcttgtctgtcccacatcatcagtggcattaagcacaagagataccatcttagcacaatccttttactctaaatgttcaggggaggggtatagcagcaaggagagggggtctctgtgatggcccaaggagrtatttttgatactgaagacccaggcccccaggggaactgcaggaagcgtctagctcataggcataggcctttcagtaaaggtcacccatccagggatccaggatgtagctggttccaggtgatgaaatcttcccaccttatgactggggaatgtcaggtctagtagcaaagcaaagagaccccagatggca

SEQ ID NO: 82 - DNA, 909 bp, Homo sapiens
  SITE (30): n equals a,t,g, or c
  SITE (162): n equals a,t,g, or c
  SITE (270): n equals a,t,g, or c
cgccgccgtctgagctggcgttgctcccgncaccgccgccgccgccgccgactcccgcgaccccgacgtcctcggcgtccaacctggacctgggcgagcagcgggaggctggtgagacgttccagaagcggcagaagcttacctccgagggtgccgccaagntcctgctagacacctttgaataccagggcctggtgaagcacacaggaggctgccactgtggagcagttcgttttgaagtttgggcctcagcagacttgcatatatttnactgyarttgcagcatttgcaagaagaagcagaatagacacttcattgttccagcttctcgcttcaagctcctgaarggagctgagcacataacgacttacacgttcaatactcacaaagcccagcataccttctgtaagagatgtggcgttcagagcttctatactccacgatcaaaccccggaggcttcggaattgccccccactgcctggatgagggcactgtgcggagtatggtcactgaggaattcaatggcagcgattgggagaaggccatgaaagagcacaagaccatcaagaacatgtctaaagagtgagcttctgcctctcctgccctgaaaaggaggaatgattggggccagcaactttgctctccctgccgtgcctcggtggtgctcctgaatgtggctgacctgggctgctggttccgtkgactagggtcatcttgatctctgcagtttgctccagctaccagtttctttaggcagctctttgtcctccctctgcccagattttgatgtagtctaattgacatccttctcttcccaacttttgtgtgatcttttaggaaaaaaaataaatatttttaacattaaaaaaaaaaaaaaaaaaaaaaagggcggccgctcgcgatctaga

SEQ ID NO: 83 - DNA, 517 bp, Homo sapiens
  SITE (341): n equals a,t,g, or c
gtcagccaaagatggctgcgccmaggtaatttgagcaaaggccacagtgaactccggcgtggctgaggaaggaggaggcacccacaggctgctgggaggagagcataaggaatctacttgaaaatggatcggtttatgttggattaaatgctgctctttgtggcctcatagcaaacartctttttcgacgcatcttgaatgtgacaaargctcgcatagctgctggcttaccaatggcagggataccttttcttacaacagacttaacttacagatgttttgtaagttttcctttgaatacaggtgatttggattgtgaaacctgtaccataacacggagngacctgactggtcttgttattggtggtctataccctgttttcttggctatacctgtaaatggtggtctagcagccaggtatcaatcagctctgttaccacacaaagggaacatcttaagttactggattagaacttctaagcctgtctttagaaagatgttatttcctattttgct

SEQ ID NO: 84 - protein, 113 aa, Homo sapiens
EERVLSLWSNYQCEGEDWGHLRGTAFPSILSPPSPHNPTPPPSRPAAFRGLVPATPSGALLTPLELVAICSLVWAGGEEGRNIVPVTQLDLGLTVTLAFIECLLYARFQKFMG

SEQ ID NO: 85 - protein, 84 aa, Homo sapiens
  SITE (79): Xaa equals any of the naturally occurring L-amino acids
ASPGLGGAQSSVLHNGFFHGSPGELLYTQKIQPLPALSPFSLLLPFPMPRSRQRLTFRTSIAQLILRPLFKGWIMAHRXCVYNR

SEQ ID NO: 86 - protein, 105 aa, Homo sapiens
  SITE (26): Xaa equals any of the naturally occurring L-amino acids
  SITE (94): Xaa equals any of the naturally occurring L-amino acids
  SITE (96): Xaa equals any of the naturally occurring L-amino acids
  SITE (98): Xaa equals any of the naturally occurring L-amino acids
VNSRRGGKRSCRGGKNKPVPTTETPXHLSPVDGPAKTSTQQDYRGRNPKCWCGRSKTWGEFLDLELRAMGLDMTGTNSCHMFMVRCHTFSAVLXHXYXPGKQRMC

SEQ ID NO: 87 - protein, 142 aa, Homo sapiens
  SITE (120): Xaa equals any of the naturally occurring L-amino acids
  SITE (127): Xaa equals any of the naturally occurring L-amino acids
  SITE (140): Xaa equals any of the naturally occurring L-amino acids
  SITE (141): Xaa equals any of the naturally occurring L-amino acids
HLNVDRKRPCSIEDRRNWSLIGRPGAPASGLNRSSGLWLGPDRCRPRSRCSCRVMENPSPAAAWARPSALSSWPLSAPPASLLGESPSVPPEPRPNTASPYGQVEPDGFPSSTPVPPPAXGFVAGGXIVPLQHVEEEPVXXN

SEQ ID NO: 88 - protein, 207 aa, Homo sapiens
  SITE (165): Xaa equals any of the naturally occurring L-amino acids
  SITE (184): Xaa equals any of the naturally occurring L-amino acids
  SITE (188): Xaa equals any of the naturally occurring L-amino acids
  SITE (194): Xaa equals any of the naturally occurring L-amino acids
  SITE (195): Xaa equals any of the naturally occurring L-amino acids
LRRIFCQPAGLCTLQTTLLWFLGRAQQYLAAWDPASFLLLIQKDLPPLLHEAEALYSLASEESLALEVEQQLGLEIQKLTAQIQLLPEESLSVFSQECHKQAMQGFKLYMPRGRYWRLRLCPEPPSAPSEYAGLVVRTVLEPVLQGLQGLPPQAQAPALGQALTXIVGAWLDHILTHGIRFNLXGALXLKQDFXXVRSLWKRAWTCP

SEQ ID NO: 89 - protein, 55 aa, Homo sapiens
  SITE (23): Xaa equals any of the naturally occurring L-amino acids
  SITE (43): Xaa equals any of the naturally occurring L-amino acids
ISISYQIFLFQVFNGCKGLSYWXWYREFNFFFMILITANWKGXINGANLKIFFSF

SEQ ID NO: 90 - protein, 210 aa, Homo sapiens
  SITE (1): Xaa equals any of the naturally occurring L-amino acids
  SITE (2): Xaa equals any of the naturally occurring L-amino acids
  SITE (8): Xaa equals any of the naturally occurring L-amino acids
  SITE (132): Xaa equals any of the naturally occurring L-amino acids
  SITE (149): Xaa equals any of the naturally occurring L-amino acids
  SITE (166): Xaa equals any of the naturally occurring L-amino acids
  SITE (184): Xaa equals any of the naturally occurring L-amino acids
  SITE (189): Xaa equals any of the naturally occurring L-amino acids
  SITE (208): Xaa equals any of the naturally occurring L-amino acids
XXNFTHYXESCPPAGTGPEFPGRPTRPPTRPVDNAIDNVKEIQVALFILMAAYAMAEAFMSTGVGASLILIALKVGITAKTVAVIGAIVTSILSIATGTSWGTFAACAPIFLWLNHIVGGNILLTTAAIAGXACFGDNIGLISDTTIVXSGIQKVEVVRRIRHQGXWSALVLLSGIIVFAIGGXTMDLXLTGGDPAELLIVFQLMFGXTC

SEQ ID NO: 91 - protein, 113 aa, Homo sapiens
  SITE (3): Xaa equals any of the naturally occurring L-amino acids
  SITE (4): Xaa equals any of the naturally occurring L-amino acids
  SITE (102): Xaa equals any of the naturally occurring L-amino acids
SFXXKYKSKGRSATVLGKVLFRYIYVHMKRLDLHPITYGIRSLQYTMNGRLASPRYLRGHSQIPHGMVHYVQNTVVENLRGRLWNFCSEYFFYIYTYICIYXYIYLKHLSGPQ

SEQ ID NO: 92 - protein, 67 aa, Homo sapiens
  SITE (28): Xaa equals any of the naturally occurring L-amino acids
IHPLKYDAMGKKKKTSLLFFFGCLLIAXKINCKLFDIAFETLTYLFPTCFSSPNSCPHPSLSRICYA

SEQ ID NO: 93 - protein, 68 aa, Homo sapiens
EREVSAVLAPLPETLENEHRVPLIHCLPTSVARASRMLMDKHHLCGHTLFYELSHQTGWLLKCCCVIL

SEQ ID NO: 94 - protein, 52 aa, Homo sapiens
  SITE (45): Xaa equals any of the naturally occurring L-amino acids
VYCKILSTYVFYNILTMSLEKYICTKNFQNWFVQCGVYSAVFLTXFFRKRKS

SEQ ID NO: 95 - protein, 68 aa, Homo sapiens
  SITE (15): Xaa equals any of the naturally occurring L-amino acids
CRYRSGIPGSTHASXRVQVNANDVLATFSQKILHWNTDCNIKLLCVYCFYSCIHRSVFYRYIRSMALV

SEQ ID NO: 96 - protein, 66 aa, Homo sapiens
  SITE (66): Xaa equals any of the naturally occurring L-amino acids
DADHLLQNSYLEQFKLLVPVNKNTDQNALHVAYTVGSLHAVLDMFISTLNAMKCFINKKPLYIKKX

SEQ ID NO: 97 - protein, 107 aa, Homo sapiens
  SITE (74): Xaa equals any of the naturally occurring L-amino acids
  SITE (75): Xaa equals any of the naturally occurring L-amino acids
  SITE (85): Xaa equals any of the naturally occurring L-amino acids
  SITE (101): Xaa equals any of the naturally occurring L-amino acids
KCIMHRIPKKINPEDTEPVLVFLRKRQLEKRSVFADQYLKVNPKETDPPLRHMVAKMFNNQVSGVEKEWPDRMXXLPCPSIPRRXYVGCWGLLCTQVECSXPHSHFS

SEQ ID NO: 98 - protein, 51 aa, Homo sapiens
  SITE (19): Xaa equals any of the naturally occurring L-amino acids
  SITE (28): Xaa equals any of the naturally occurring L-amino acids
  SITE (46): Xaa equals any of the naturally occurring L-amino acids
HLVKAGRKINNTKLCYLIXLLERVRFTXYIFKLIHVKNDSDFDVIXLLIES

SEQ ID NO: 99 - protein, 89 aa, Homo sapiens
ASFIDSRSPTNSKPNKEKFTTIAIIVMLQNTKIRDKNVKSQSKQSETLSQKKKKKPVKVPKTKCRTYSLLFNGNSESQRTMKLYLKYVK

SEQ ID NO: 100 - protein, 79 aa, Homo sapiens
  SITE (2): Xaa equals any of the naturally occurring L-amino acids
  SITE (25): Xaa equals any of the naturally occurring L-amino acids
RXSWLPLALLSLSLSLALSIYIYIXIFFFETWSQKKKRKEKKGEMCRQNLMRLLSLMGPESKREKQSLDLAGWSTVKES

SEQ ID NO: 101 - protein, 71 aa, Homo sapiens
  SITE (14): Xaa equals any of the naturally occurring L-amino acids
  SITE (55): Xaa equals any of the naturally occurring L-amino acids
ETTKEYHEGIYAPXLAIICLRRNLLNKSFYPLKKKKKGGRSRGSKLTYACMRRHXSSIVSPKFNSLAVVLQ

SEQ ID NO: 102 - protein, 45 aa, Homo sapiens
FGEKYLAEGSIELINQYIDIFKTFLHISKLPSLSITTFKNKAAYF

SEQ ID NO: 103 - protein, 121 aa, Homo sapiens
  SITE (35): Xaa equals any of the naturally occurring L-amino acids
  SITE (97): Xaa equals any of the naturally occurring L-amino acids
QITDGGVKVLSEELTKYKIVTYLGLYNNQITDVGXRYVTKILDECKGLTHLKLGKNKITSEGGKYLALAVKNSKSISEVGLIQNQITAKGTASWQMXYRAHWHNRDLPKWKPDKTRGGQSL

SEQ ID NO: 104 - protein, 50 aa, Homo sapiens
  SITE (17): Xaa equals any of the naturally occurring L-amino acids
CLFLKLYKTLCCHFSCXTVIHVLNEFDNEIILLSFLMNTFLIFMIFLMKL

SEQ ID NO: 105 - protein, 39 aa, Homo sapiens
  SITE (39): Xaa equals any of the naturally occurring L-amino acids
NVMTKTDPDVNYGFLVMIGKCRFNNNNIYTTLMGDIDNX

SEQ ID NO: 106 - protein, 64 aa, Homo sapiens
HFTLLSLSHICTYPSIHSSMNPSIHLIFYIFQVKLQICSLCFTLNVSAWLLLTGVQYVFGSSLW

SEQ ID NO: 107 - protein, 111 aa, Homo sapiens
  SITE (77): Xaa equals any of the naturally occurring L-amino acids
IPYSAYIKSKMWGRSLLLPGGDGSPLTLLGEGGSCWPVGMKVLAPHLVFPDTTAVGCWGAPLQPFECGILGSPLDLXWCGQRFFLWCLLGVEQLSSKSFLSCWDVLFWSFS

SEQ ID NO: 108 - protein, 79 aa, Homo sapiens
TSSTINCSLGTFYAQNCAPSSEQQVFNGPCDEKGPIKAAGMGHSPTPHGPGHCHSCCPASPGLWLHGRSHFCKKFTFLK

SEQ ID NO: 109 - protein, 99 aa, Homo sapiens
  SITE (63): Xaa equals any of the naturally occurring L-amino acids
  SITE (75): Xaa equals any of the naturally occurring L-amino acids
  SITE (88): Xaa equals any of the naturally occurring L-amino acids
  SITE (91): Xaa equals any of the naturally occurring L-amino acids
  SITE (92): Xaa equals any of the naturally occurring L-amino acids
  SITE (97): Xaa equals any of the naturally occurring L-amino acids
VIELKPKMCLISLCVSFTSVNKREQNKPKILILLKKRLSGCFIKEARGTRLKGNQLAVTKARXDGGLAEDGDSGXGKVIRILGYIFEXLTXXGQLEXAL

SEQ ID NO: 110 - protein, 72 aa, Homo sapiens
TTSRWVPRRCFQTLGMPSSSLAMSRGEAGGRSNENEAPQFSAEHMGICNKDLISQLLLKLGMATTLNSARGD

SEQ ID NO: 111 - protein, 104 aa, Homo sapiens
  SITE (14): Xaa equals any of the naturally occurring L-amino acids
ACRYRSGIPGSTHXSERLILELGKKVEQTIQYNSELEQKVNELTGGLEETLKEKDQNDQKLEKLMVQMKVLSEDKEVLSAEVKSLYEENNKLSSEKKQLSRDLE

SEQ ID NO: 112 - protein, 63 aa, Homo sapiens
DEKKTRLKPVHHMPGSAFCRPPCRDLVMENYTHLTDEGTVAGFKKPWRPGTVAHACNPSTLGG

SEQ ID NO: 113 - protein, 55 aa, Homo sapiens
  SITE (19): Xaa equals any of the naturally occurring L-amino acids
  SITE (36): Xaa equals any of the naturally occurring L-amino acids
SGGQGKRIGLNPGGGGCSXLRSRHCTPAWATEQDSXSKKKKKRKKRKEKKKKKMS

SEQ ID NO: 114 - protein, 46 aa, Homo sapiens
FLGMIMALYLSIFLESFKVMMLLKKCIMTYLWEKIQFVWDVKMLKG

SEQ ID NO: 115 - protein, 43 aa, Homo sapiens
  SITE (28): Xaa equals any of the naturally occurring L-amino acids
VSTRAVLHNTNGLRSVVSLLCVVFIFHXGDPLGTTLLETRRTV

SEQ ID NO: 116 - protein, 63 aa, Homo sapiens
GKVVHQQNDRQCDIVDTLALGALSSVCGPFTKLLCDLEQIASPFWLSLAVKERDWSGKSPETF

SEQ ID NO: 117 - protein, 102 aa, Homo sapiens
NYPDQLQCKIPGGVCWLMRGTEKNNLKVKEPVLMPAKSLRITKRNTPCGEGSQTQDHFQTRIHKQLVDLLAILDCEADCSVGIELRAALTSPLQILTKCLIK

SEQ ID NO: 118 - protein, 68 aa, Homo sapiens
IVFSTVTPGKKVKATCYKLSYRSSGLYQRMQNWFVHLHFLNELILNFLLLLCVYREKVNKNFGIKKES

SEQ ID NO: 119 - protein, 219 aa, Homo sapiens
AGATESQDSSMEQIDRNNFEMSLLPTTCLSPTGRRCGSCQKTPEPVIKAKDLSAQQVPASLNKTSLKEISGERLSSIPEASEYDWRNYQPSQMSESELQMLASLRWQQNEELEDAGTSHGLSASQVDNCNVSISTSSDDTTTWNSCLPPPVNQGRHYQKEMNPPSPSNPRDWLNMLSPPIVPPSQQPAEQRPDSCESLSVQGGTMKNDMHKKIKIIYYK

SEQ ID NO: 120 - protein, 88 aa, Homo sapiens
GKGNTPQVPPTVISIQPSTTSPCRSVVFYCLPRTSVKCQGETRTLGDLQWFLPLMKVRGGLFVHIHTCTPSHVLQRLKDHQHLGNCHA

SEQ ID NO: 121 - protein, 233 aa, Homo sapiens
  SITE (152): Xaa equals any of the naturally occurring L-amino acids
  SITE (231): Xaa equals any of the naturally occurring L-amino acids
IMPCAQRSWLANLSVVAQLLNFGALCYGRQPQPGPVRFPDRRQEHFIKGLPEYHVVGPVRVDASGIFCHMACTIPSRSSRRKRDLDGSEDWVYYRISHEEKDLFFNLTVNQGFLSNSYIMEKRYGNLSHVKMMASSAPLCHLSGTVLQQGTXVGTAALSACHGLTGFFQLPHGDFFIEPVKKHPLVEGGYHPHIVYRRQKVPETKEPTCGLKGIVTHMSSWVEESVLFFWXFY

SEQ ID NO: 122 - protein, 39 aa, Homo sapiens
CRLFFCPCAFHHVKDIGISPSCHVKDSGKKALSWDRVGA

SEQ ID NO: 123 - protein, 28 aa, Homo sapiens
  SITE (19): Xaa equals any of the naturally occurring L-amino acids
YEIGFFSSLQMTMKIGFIXVLSALFFDA

SEQ ID NO: 124 - protein, 44 aa, Homo sapiens
DDLLKWFTIHLTQNNPKNHSNQEIEIFVFTLRTSMKLPRQSRVM

SEQ ID NO: 125 - protein, 97 aa, Homo sapiens
EDQDSFPSPTNLPSPVSYSLGPLAPFKMDKLNSPAPLLPTLTSYPWCMMPYFSLFCLNKSMLGNFRLRAGKRWDMESSAIDCRTRNFRSSRPFNRPQ

SEQ ID NO: 126 - protein, 115 aa, Homo sapiens
GKWYLEFRIDRLSGTKELLFFSRFCRHEIVIISVEKHRKAFSFFIFFLWLAALPSDVESTCSNLVPSRTTSHIPRGEHMPVGAVLMASRVIAVAELEGNHQVPPSIFISFQHWFC

SEQ ID NO: 127 - protein, 36 aa, Homo sapiens
IFRLEGIGVGYSEGVIFGCIWTFKKCAYIYSTMNIM

SEQ ID NO: 128 - protein, 80 aa, Homo sapiens
  SITE (29): Xaa equals any of the naturally occurring L-amino acids
  SITE (65): Xaa equals any of the naturally occurring L-amino acids
  SITE (67): Xaa equals any of the naturally occurring L-amino acids
  SITE (78): Xaa equals any of the naturally occurring L-amino acids
SLQVQSYSIHTHTWRSQERTRPEMGSCPXTPVGWKQVHNASLSISVSVADIQMQGFFRASLGMGXHXHTGQITAQPLXLY

SEQ ID NO: 129 - protein, 113 aa, Homo sapiens
KCYHERRKLDFFVLIMASTCTFPEWSLLRPFLVPFQSCPHHPAPLASVHSGPQPRPGLLCSAPTAHHPSCFPEPDPVPPTGNQGCALPCPRSPGLPVLSLLIIINSGFQLQPR

SEQ ID NO: 130 - protein, 67 aa, Homo sapiens
NILLFHCAKIVTVNVSFQSFSMHSLAMTSHGDKPTGLIQPPMSGFYRSAQSSQAQSQSRARTQIHTL

SEQ ID NO: 131 - protein, 51 aa, Homo sapiens
  SITE (36): Xaa equals any of the naturally occurring L-amino acids
KYLSISSYVNTLKFYNFLEKKSYSFIVFTFTFIMSXCFNTMKVYGMCNLQT

SEQ ID NO: 132 - protein, 50 aa, Homo sapiens
AYLNANYYSMSNAVKKYTEHKILAQFISSRVSIQKIDAHLNIHSQEQHLR

SEQ ID NO: 133 - protein, 23 aa, Homo sapiens
SIVIILGIDSYKIYTVTVYFVQI

SEQ ID NO: 134 - protein, 37 aa, Homo sapiens
RVHFWGNAKLLELDNDVCTTLNTLKVTEWYTINELML

SEQ ID NO: 135 - protein, 132 aa, Homo sapiens
  SITE (2): Xaa equals any of the naturally occurring L-amino acids
  SITE (9): Xaa equals any of the naturally occurring L-amino acids
  SITE (116): Xaa equals any of the naturally occurring L-amino acids
YXSLLGKLXRLQVPVRNSRVDPRVRPRVRFTQEEWYLLDPAQKILYRDVILENYSNLVSVGYCITKPEVIFKIEQGEEPWILEKGFPSQCHPERKWKVDDVLESSQENEDDHFWEXLFHNNKTWNLKLIKVE

SEQ ID NO: 136 - protein, 62 aa, Homo sapiens
CIVKWHLAEIHTPKTHHHFIRCPKNSVFSLFIYCYFCFFLTHYILTANELINYPFWKKKKKK

SEQ ID NO: 137 - protein, 97 aa, Homo sapiens
  SITE (9): Xaa equals any of the naturally occurring L-amino acids
  SITE (13): Xaa equals any of the naturally occurring L-amino acids
DTHWPGNFXGKNXNKLVQKFELGSSSIAHMVMGTTNQFSTRTRLEEVKGFFSSLKENGSQLRCVQQTIETIEENIGWMDKNFDKIRVWLQSEKLERM

SEQ ID NO: 138 - protein, 55 aa, Homo sapiens
  SITE (54): Xaa equals any of the naturally occurring L-amino acids
ISYSQIAFRLKFLLRVSEMSACEEHVNIARYQSLFFSGFLVLCFFFKAKEICIXH

SEQ ID NO: 139 - protein, 45 aa, Homo sapiens
  SITE (37): Xaa equals any of the naturally occurring L-amino acids
QAPFLVPDFSGEYTYNITNKYNIYYSFLGVDLLVLQXICPMSVLP

SEQ ID NO: 140 - protein, 106 aa, Homo sapiens
WIPRAAGIRHETDKILPVETDKKPQGKQLQTRADYLLKLLRKGLEKKGAVTGGEEAKLKKRKPRVKKENKVPRLKEEHGIELSSPRHSDNPSEEGEVKMMAWKKVQ

SEQ ID NO: 141 - protein, 77 aa, Homo sapiens
  SITE (50): Xaa equals any of the naturally occurring L-amino acids
KSESASSSLRTEFYSHSRFVLQMDSLIVEITSLQSANVITAQEKVMPTFXDNPLSPILYITGVNSSWRKMARTWNQD

SEQ ID NO: 142 - protein, 91 aa, Homo sapiens
KAAVKRIFKAAREKRIHDIQGDTHGNHHSRPVRNHGVQDTVDHIFEDLGWEELTQNSVCSRNILQECKCNKESSDRIQEHLSSAEPLLLEM

SEQ ID NO: 143 - protein, 49 aa, Homo sapiens
EHLQQFINEVTFTLGQLLHAKFFVCVKHFKTDLKDVNLKLVVSNMPQVR

SEQ ID NO: 144 - protein, 25 aa, Homo sapiens
  SITE (25): Xaa equals any of the naturally occurring L-amino acids
NANENIYIRRIRHLLQMLPFQEGAX

SEQ ID NO: 145 - protein, 270 aa, Homo sapiens
  SITE (1): Xaa equals any of the naturally occurring L-amino acids
  SITE (2): Xaa equals any of the naturally occurring L-amino acids
  SITE (41): Xaa equals any of the naturally occurring L-amino acids
  SITE (264): Xaa equals any of the naturally occurring L-amino acids
  SITE (267): Xaa equals any of the naturally occurring L-amino acids
XXYANSNTTHYRESWYACRYRSGIPGSTHASAKCGAVLCPXAPCQHPTQPPGACCPSCDSCTYHSQVYANGQNFTDADSPCHACHCQDGTVTCSLVDCPPTTCARPQSGPGQCCPRCPDCILEEEVFVDGESFSHPRDPCQECRCQEGHAHCQPRPCPRAPCAHPLPGTCCPNDCSGCAFGGKEYPSGADFPHPSDPCRLCRCLSGNVQCLPAAACRCLVQSLSCCRESAARNGPSRPAPGRLPTGPGAGQRPGHQGSTFFPRXRAXPLA

SEQ ID NO: 146 - protein, 152 aa, Homo sapiens
  SITE (19): Xaa equals any of the naturally occurring L-amino acids
  SITE (85): Xaa equals any of the naturally occurring L-amino acids
EKSDAACQTLLSLPVDFNXENILGDYFRADEFADQSPGNLSSSSLRRKLFLDGNGSISDSLPSASPGSPHSGVQTSLEMFYSIDXSPVKCRSPLQTPSSGQFSSSPIQASAKKYSLGSITSPSPISSPTFSPIEFQIGETPLSGMSHNKIPS

SEQ ID NO: 147 - protein, 78 aa, Homo sapiens
  SITE (1): Xaa equals any of the naturally occurring L-amino acids
XTRPPTRPPVHAGRRRLQCNYFGTRTSSCWPKRQWFMDLHPFCIFVIFVNMNFLNCCKDGFFCKMFSTFTFNPSLCIF

SEQ ID NO: 148 - protein, 108 aa, Homo sapiens
KQTSGKRKMRQDAEKKSSPTLPFSGKSKCPLVGGGGQRHSRWTSVLSGPATPEQNSLRAWCPCAQFSECRSAQFSERRSAPFITCSPVHSHRQGLLVSVSGAHPQDHV

SEQ ID NO: 149 - protein, 91 aa, Homo sapiens
  SITE (1): Xaa equals any of the naturally occurring L-amino acids
XKLVRLLVPVRNSRVDPRVRPRVRNNSFHRVGILGEPRCLFNPHTLHPLDPEENTKSFGRYPSLMENNNMRIQDTLDLVMKTLSSHTSCPK

SEQ ID NO: 150 - protein, 176 aa, Homo sapiens
  SITE (167): Xaa equals any of the naturally occurring L-amino acids
  SITE (170): Xaa equals any of the naturally occurring L-amino acids
CQQLMDLTANLNLLWSAPFQILMAVYLLWQELGPAVLAGVAVLVFVIPINALAATKIKKLKVSLATLCVYFLLDEGNILTATKVFTSMSLFNILRIPLFELPTVISAVVQTKISLGRLEDFLNTEELLPQSIETNYTGDHAIGFTDASFSWDKTGMPVLKEALWLMXLNXPGFKIA

SEQ ID NO: 151 - protein, 66 aa, Homo sapiens
  SITE (59): Xaa equals any of the naturally occurring L-amino acids
  SITE (61): Xaa equals any of the naturally occurring L-amino acids
  SITE (63): Xaa equals any of the naturally occurring L-amino acids
PEKNIFPCLRIFYTLYNVLSEIMEEFKKEKIDNHTYLVSLEYLHLDTTSVAEARHNPAXGXEXLVG

SEQ ID NO: 152 - protein, 71 aa, Homo sapiens
  SITE (1): Xaa equals any of the naturally occurring L-amino acids
XSLSYGIISQSQILSQKNETHAGKATCKSCLFLQLVYFNIVKGSFKGGKKALNGTSQSKSLPQGLPCYLQD

SEQ ID NO: 153 - protein, 68 aa, Homo sapiens
GLEIQTHHHDLWHQASPSTGGCHPPACGFSAISSPGRADHTRGCGATGLASPPSLGASPSSLPSPVGS

SEQ ID NO: 154 - protein, 66 aa, Homo sapiens
  SITE (13): Xaa equals any of the naturally occurring L-amino acids
QQGEGVSVMAQGXIFDTEDPGPQGNCRKRLAHRHRPFSKGHPSRDPGCSWFQVMKSSHLMTGECQV

SEQ ID NO: 155 - protein, 194 aa, Homo sapiens
  SITE (10): Xaa equals any of the naturally occurring L-amino acids
  SITE (54): Xaa equals any of the naturally occurring L-amino acids
  SITE (90): Xaa equals any of the naturally occurring L-amino acids
  SITE (92): Xaa equals any of the naturally occurring L-amino acids
PPSELALLPXPPPPPPTPATPTSSASNLDLGEQREAGETFQKRQKLTSEGAAKXLLDTFEYQGLVKHTGGCHCGAVRFEVWASADLHIFXCXCSICKKKQNRHFIVPASRFKLLKGAEHITTYTFNTHKAQHTFCKRCGVQSFYTPRSNPGGFGIAPHCLDEGTVRSMVTEEFNGSDWEKAMKEHKTIKNMSKE

SEQ ID NO: 156 - protein, 155 aa, Homo sapiens
  SITE (43): Xaa equals any of the naturally occurring L-amino acids
  SITE (97): Xaa equals any of the naturally occurring L-amino acids
TPAWLRKEEAPTGCWEESIRNLLENGSVYVGLNAALCGLIANXLFRRILNVTKARIAAGLPMAGIPFLTTDLTYRCFVSFPLNTGDLDCETCTITRXDLTGLVIGGLYPVFLAIPVNGGLAARYQSALLPHKGNILSYWIRTSKPVFRKMLFPIL

SEQ ID NO: 157 - DNA, 3972 bp, Homo sapiens
ccagcccaggtcttggaggagcacaatctagtgttctacacaatgggtttttccatgggtctccaggagagctattatacacccagaagatccagcctttaccagcgctctctcctttttctctcttgctccccttccctatgccaaggagtaggcaaaggttgacatttcgcacctccattgcccagctcattctaaggcctttatttaaagggtggataatggcacatagaagatgtgtctataacaggtagcacatttcctatggtgcttggcatatgtcttagtcttttcgggctgctataacaaaataccatagactgggtggcttataaacaacagaaatttatttctaacagttctggagtctgggaaatctaagatcaaggtgctggcagatttggtgtctgatgacggtctgattcctagtagatggctgtcttctcactataactcacatggcagaaggcacaagggatctctccgatgtctctttgataagtgcactaaacctatgcatgagagttctaccattaggacctattcacctcacaaagtctccactttctaacatcatcatcttgggggttaaaatgaattttgtggggactatacatttagtctattgcagaaaagaaaggtatatttatttttttaccagattaaatttgattcaaggcctcctttgtcaagatggataatcagtccaagaattctagaacttgtacaagccaaaagtaaaaaaaaagaaagaaaaaagggggattaattcaattaagaatatacatccccaatggcccatcaattcagctacctgggacatctctattccaggggaattttcacatgagtccataatgggacacatacagagatgttcactgtggtgttgaatgtggtggtctggagttggaggtaatctggctgctgtcctgtgtgagggaggatgagaatcaatcatggttcagaagcctgcaaggcaatattcctcagtccatgtgtctcctttcctgacagatggcccttgtttgaacccttcatggggtaagcaactcagagtggcgtgttttgctgctgggaagctcagattgtgccagaattacatctccctggagatgattgtggtgggcttggtatcttggaggggtgtgtatgcgtgtgtgtgtgtgtgtgtgtgtgtgtgtgcatttatgggaaacactgtgttttcattcatccatttattcattcataaaacatacggttatggggcaacagccccatgctaggttctggagatacaatgacctctgccttcatggtgcttacaatctagtgggggaaacagatacaactgatgattctggcactatgagaaataagcatttgtatgacaggagagagggaggacccaacttaaggttgatgggccatgaaggactcctctgaaaaaaggaacatctaaatcaggcctgagagctgagtagaaattaggcaggggaagaaacaggggtagaatgttccaggtggaggtaatgtgtgcatgagggtgatgtggtgggcgagagcggctgcttcagggaacttctctgcctggctggagcaaggcaggtaagcagagccagctggaggagaggaggctggggacacacaaagcctgctgtgtgataaggtgaccatgtaatttatcatccagactagaatgcattgaaactgaaaggtcgctctcctaataatattgttgggatgacggtcactctacttgtaggtcagggtaaagagtttgagttttagtctcaggaatatgggaagccactggggcctcaaggaaagagagatgtgacctagtttgcacccggaggggcctgagatggggctataggactcagaaacctcctaccagccttcccatctgcatggaggagacacctgaagaagatttggagagtatcagaagtcttggggtaaatgagcgaggcagccaggagcccagaaatggcctttgtaatcctgtgggacaggtgatgagcacattactgtcgagtgtgccgcctggttcctgcctgcttcctgacagatgctcctcctagcaagtgaatctgcccccagctgaataggaaggagacagtgataagaacttcctcatgagtaccacgactgggggatgctctgtcatgccccagctgcagatggaggtgggaagggaacaacccccttcccaatgattttacaaagcaggagtgtgagatgtatggataagatgtccaggctctcattttgatacccaggcacactggtttccagagttaaccactcaggacattgtctgtccaaagaagaggccacagcttgctctggagcttacacatgggggagtgatcatggggtcacccctgtccactcacacatagatccatagacccgggtccagaggacaaagcacaaattctccccctcccccttaggggtgttgaggtaggcagaccccagaaatagtggtagcttagaagggaaccaaatttccaaaactcctcaaagctgtctgtgcacatacccagaatatcagagtcattctccagttgggactcaggtctcttccatcagaccaagaggtggctaaggataatagctgggtgtggcagacactgtccattgcatatccaacagccatccccgctccttccctgttaacaatgtgacttgtgtaattagcaactggagattctttgatcttagggaggcaaagatcaagggccctctggcagtcccaggaggtgaatcatgattggtctaaacaagtcatgacaactcattcccttggccaacgactggtgtaggtggggagaaggtgagagagatgggatctggccaatcacaggcaaggggaagtctgctggggagggttcctcttcccaaataaaaagacaaagccttggctgggggaattccttttatcccttttttttaaaccctcttccctccctggactgaagatatgatgctttgtgttgcagaggtctctttgcaaccaaaatgcaagaagttagaatgcaaggatggtgaagcaggaagatagaaagagtctcagttcttgaagtcatcattgagctgctccagctctggatggccctgcctctgggtttcttgttatgtgggacaagtaacctgcaccatgtaagctgctgtagctaggcattctgtgatgtgcagctggagtctgcctctgactcccaccctcatgggaaggaagcttccattttcggggattcctgcttccatccttgaaggaggaattgaatcgcacaaagacataaggggctctcaagatctcaagaccatgaatcctagtttgggctcttccctaacaggatgaccttgggtaaattagtcgtgttgggtcttggtgtccttgtctgcacaatggatgcagtaacagtacttgcctcatagggttgtgggaaggaagtgagctaatcaatggaaatcactggatataaagtaggtgttcaataaaagtcagctcccttccctctctgggagtcacacagaactgcccctccaaactgtcaggttgcctacatgttcaatgtgcatgtcacccttcttaccaggagaagatttgcattatggaaccttgagttttaaattaagtgtcaaatataatttgatagttctaagaattaattatgtgactgcccttagaaaagccaggaagggagaaaagcacagggagggaagctagggaagctcccttactcaccagggaattggatggaagaggacaaggatggtgctttgcacattagtgcgtttcccacccgggactttcagaagcagggctccttgaggagtgatgaaaggggcaggtgtgagggatagagaagaaaatcttaccaggaggtgtccccctgtcatgggcggctctgtcctgcctggccccgccctccaaggcgtgcgcacatttgtcagcagcagacatacgtgtggctggtg

SEQ ID NO: 158 - DNA, 3972 bp, Homo sapiens; identical to SEQ ID NO: 157

SEQ ID NO: 159 - DNA, 888 bp, Homo sapiens
aaaaaaaaaaaaaaaaaacaagcatctgtcttcaagcttagagtctcccacgggagacagacacattaaacaggctaaatggtgcagtctggtcagtgctatttataatttaggaaccttacatattatatccctactctaacctgttaatgttctatagactccccatccccaggatgtcaacctcagtccctcaaggccatacctggacccaacgggtgaagaaagacgatgaggaggaggacccgctggaccagctgatctcccgctctggctgtgctgcctcccactttgcagtgcaggagtgcatggcccagcaccaggactggcggcaatgccagccacaggtgcaggcgttcaaggattgcatgagtgaacagcaggcgaggcggcaagaggagctgcagaggaggcaagaacaagccggtgcccaccactgagaccccaaaccacctatccccagtagatggccctgccaagaccagcacccagcaagattatagaggaagaaatcctaaatgctggtgtgggaggtctaaaacatggggagagtttttggatctggagttgagagccatgggtttggacatgactggcacaaacagctgtcatatgttcatggtcagatgtcatacattctcagctgtcttgttccaccagtatttaccaggaaaacaaagaatgtgttaagggatgctcccccaccccacatcttaagtcagtgtgccaagtactgagatgattttagggacattttattttaaattaaatttacaatctaatggtaaattgattacctaattagtgcctttctctttcatcacttgttctggatgtttcaatcagtttagtggaaggaaaaataaatggggaaactttttattcaaa

SEQ ID NO: 160 - DNA, 729 bp, Homo sapiens
gactcccaatccccaggatgtcaacgtcagtccctcaaggccatacatggacccaacgggtgaagaaagacgatgaggaggaggacccgctggaccagctgatctcccgctctggctgtgctgcctcccactttgcagtgcaggagtgcatggcccagcaccaggactggcggcaatgccagccacaggtgcaggcgttcaaggattgcatgagtgaacagcaggcgaggcggcaagaggagctgcagaggaggcaagaacaagccggtgcccaccactgagaccccaaaccacctatccccagtagatggccctgccaagaccagcacccagcaagattatagaggaagaaatcctaaatgctggtgtgggaggtctaaaacatggggagagtttttggatctggagttgagagccatgggtttggacatgactggcacaaacagctgtcatatgttcatggtcagatgtcatacattctcagctgtcttgttccaccagtatttaccaggaaaacaaagaatgtgttaagggatgctcccccaccccacatcttaagtcagtgtgccaagtactgagatgattttagggacattttattttaaattaaatttacaatctaatggtaaattgattacctaattagtgcctttctctttcatcacttgttctggatgtttcaatcagtttagtggaaggaaaaataaatggggaaactttttattcaaa

SEQ ID NO: 161 - DNA, 609 bp, Homo sapiens
caaaaccccatctctgctaaaaatacaaaaaaattagccaggcatggtggtgcatgctgagtgtaatcccagctacttgggaggctgaggcaggagaatcacttgaacctgggaggtggagatggcagtgagccaagatcgcaccattgcattctagcctgggtgatggagtaagacggtctcaataaataaatagataataaagatgaagtagacatcacctatttgtaaattataacagaaaagattaccatccagaattaaaagtacctggaagccaccaagaagcacatagtttgacagcaaagtgaacaagtaaggcaggcgcagtggctcacgcctgtaatcccaacactttgggaggcagaactgggtggatcacttgagatgaggagtttgagaccagcctggccaacatggcaaaatcccgtctctactaaaaacacaaaaaaattagataggcgtgtgcctgtaatcccagctacttgggagactgaggcaggagaattgcttgaacccaggatgcagtgaaggttgcagtgagctgagatcctgctactgcactccagcctaggtgacagagcgagactccatctcaaaaaaaaaaaa

SEQ ID NO: 162 - DNA, 609 bp, Homo sapiens
caaaaccccatctctgctaaaaatacaaaaaaattagccaggcatggtggcgcatgctgagtgtaatcccagctacttgggaggctgaggcaggagaatcacttgaacctgggaggtggagatggcagtgagccaagatcgcaccattgcattctagcctgggtgatggagtaagacggtctcaataaataaatagataataaagatgaagtagacatcacctatttgtaaattataacagaaaagattaccatccagaattaaaagtacctggaagccaccaagaagcacatagtttgacagcaaagtgaacaagtaaggcaggcgcagtggctcacgcctgtaatcccaacactttgggaggcagaactgggtggatcacttgagatgaggagtttgagaccagcctggccaacatggcaaaatcccgtctctactaaaaacacaaaaaaattagataggcgtgtgcctgtaatcccagctacttgggagactgaggcaggagaattgcttgaacccaggatgcagtgaaggttgcagtgagctgagatcctgctactgcactccagcctaggtgacagagcgagactccatctcaaaaaaaaaaaa

SEQ ID NO: 163 - DNA, 1434 bp, Homo sapiens
ccatggtacagctcagcaactgctccaggacagcaagacaaaaatagaagtcatacgaatgcagattcttcaggcagtccagactaatgaattggcttttgataatggtgatggaataaattgtcctccttcttatgagcataatggtgctaaataatcttatgcaggaacagggcagtggttcaaagttaagagggaggaagcattactattacttttttttttttttctttttttttttgagacggagtctcgctctgtcgcccaggctggagtgcagtggcgggatctcggctcactgcaagctccgcctcccgggttcacgccattctcctgcctcagcctcccaagtagctgggactacaggcgtccgccactacgcccggctaattttttgtatttttagtagagacggggtttcaccgttttagccgggatggtctcgatctcctgacctcgtgatccgcccgcctcggccccccaaagtgctgggattacaggcgtgagccaccgcgcccggcccttttttttttttttaatcttgagttttagactcttcacttggatagatgcttttagatatttggcccttatgtttcaagaagatattgatctagaatgtatctcttcatttaaatagattatcaaatacttacaatcagtcttcatttaaaaaaaaatctgttacctgtttaagagtatggctttgttttcttttgtttttttgttttgttttatttattttttaattccagaagaagtctttaaagctagttgctaagagtaggagtagaaactttcggtctccccatgttacaatatttggatatctttcagctctaaaatctttttttcagatttgtaatttagatgtgtaatgacaaaaatgaaaggctctgaatttcaatatcatatcaaatatttttatttcagtgtttattgatgtaaggactaagttattgtaatgttataggaattcatttcttttcatgattttaatcactgcaaattggaaagtcagataaatggtgcaattaaaatttttttttcctttctagcaaaacctgtgataagtcctcttgaacttcggatggaagaattaaggcatcattttaggatagagtttgcagtagcagaaggtgcaaagaatgtaatgaaattacttggctcaggaaaagtaacagacagaaaagcactttcagaagtaattttaaataaaaatttttatttggtttaataaatacattattcaaagtatgtgattatttaaatgacaacaattgtcttttccctgtgcaaggctcaagcaagatttaatgaatcaagtcagaagttggaccttttaaagtattcattagagcaaagattaaacgaagtccccaagaatcatcccaaaagcaggattattattgaagaactttcacttgttgctgc

SEQ ID NO: 164 - DNA, 2271 bp, Homo sapiens
tcagataatcaaaataatttttatttggttgtagaatgttgtagtacataaagcaaaatgtgtctgcaggatactccaaatttaccaacttcaaacaaaataatgcacagtgaagaattagaaaattatcaaccttactcaatacatggaagtattccttaatcttcatcattttcattaaacaaaataatattttggatgagttcaacatttctatcctatgctttatgtttagtgccttccctgaattggaaaaaatgaggtgttttatttaaatttaacactggtctaagggagatatagaattaaactaaacaagaatcggttatcacaacctcacaacatatatcaaagtattgagattgttggtttactgactgtcacttttcactggatattaaatatcctgagggctacaactgtattttttaacctgtcccagtacctcaacaaaattttcactgaatgtatgaataaattatgttaacaaaaagttaacaataaaagtataatgaagatccctttaattaattttaaaatctgaaaggaaaactggagtcacaaaacatatgttcaaatcttaattcatcacaaattttgtgatttttgacctccacctcaatgaagctcagttttctcagctgaataaaagggataatgcctgtgtatttcagagtagctgtaaaggtaaaatgaggcaatgtacatgaaagtcctttggaaataccaaacaaatgttatttgctatcatgctaccacatatacatgtaggaaatatatgtattaaataagaatatttttaagatgcaatgtgataacttacattaaatatatatacaatttttcctaaatgaaaactaacctaattcctctctttaactgacaaacacactcaaaactgctcatccaaaaaaagtcccttccttgaagatgtagtccccagctttttctcttctctagtaaatgctgtcagaaaagagttgacacctatgcatcttcttcctaatgcactgaaagctgactcaatgaccactgcctatagaacagtttcaatatgtttaatccattgatttcttttaaattatcactttattttatccctgaagatttctttttgagtactttccacacctatcctggcttcttcaaaacaactaccctttttttcttacttctgtgactataaggttgtattattggatctccttttttctcatcctaatttctgcctagatgatcaaacctgctccaatagaatcaggtatcatctctgtattgtaagctttgaaatatttgtctctgtctcaggtttcctcctaatttctaggtctatatttctaattattaaccaaagatttctatctggatgcccttcattctatgtaaagtcaaactcattatccttctctctttttccaaaccttctccctccctttgttgccaatcttggtaagcagccaagcagaaatcttagagtcattaatgacttttccactcttcctcacctcttacttccattatctagtaacaggatctattgattccatctcttaaatgtctctctaatccatctactctcttccctattttaatttccacttccttcattggatcttcattatttctttttgaaatattttgatcgcctcttatctagtctctatgctttggtctcacacaatttaaatccatcctcttaaatatgatgccatgggaaaaaaaaaaaaaacatccttacttttttttttttggctgcctactcattgcctggaaaataaactgcaagctctttgacattgcatttgagacccttacttatctgtttccaacctgtttttccagccctaactcatgcccacacccttctctctctagaatatgttatgcactttcagtttcatgccctggttcatggtgttccctctacctgttatggttgttcttcatttgtcaaaaacctctacatctttcgagcccatgtgatatgtgattttctctgtaatattttctctatcctgcttctgggtaaaattaacctctattccttatgttctcttctactgctattaaaattaaatttaagttgtagaagtgtttatctccttcactgtatcagactcaaaggaaaaagttgtgttcattttgattcacatatgcttaacacaatgcctgaccaatagagggtatccaataaatactgaactgaacaaatctattcctgatctgtgtaataaacagggagaacaaactttaagaataattctcatgcat

SEQ ID NO: 165 - DNA, 2271 bp, Homo sapiens
tcagataatcaaaataatttttatttggttgtagaatgttgtagtacataaagcaaaatgtgtctgcaggatactccaaatttaccaacttcaaacaaaataatgcacagtgaagaattagaaaattatcaaccttactcaatacatggaagtattccttaatcttcatcattttcattaaacaaaataatattttggatgagttcaacatttctatcctatgctttatgtttagtgccttccctgaattggaaaaaatgaggtgttttatttaaatttaacactggtctaagggagatatagaattaaactaaacaagaatcggttatcacaacctcacaacatatatcaaagtattgagattgttggtttactgactgtcacttttcactggatattaaatatcctgagggctacaactgtattttttaacctgtcccagtacctcaacaaaattttcactgaatgtatgaataaattatgttaacaaaaagttaacaataaaagtataatgaagatccctttaattaattttaaaatctgaaaggaaaactggagtcacaaaacatatgttcaaatcttaattcatcacaaattttgtgatttttgacctccacctcaatgaagctcagttttctcagctgaataaaagggataatgcctgtgtatttcagagtagctgtaaaggtaaaatgaggcaatgtacatgaaagtcctttggaaataccaaacaaatgttatttgctatcatgctaccacatatacatgtaggaaatatatgtattaaataagaatatttttaagatgcaatgtgataacttacattaaatatatatacaatttttcccaaatgaaaactaacctaattcctctctttaactgacaaacacactcaaaactgctcatccaaaaaaagtcccttccttgaagatgtagtccccagctttttctcttctctagtaaatgctgtcagaaaagagttgacacctatgcatcttcttcctaatgcactgaaagctgactcaatgaccactgcctatagaacagtttcaatatgtttaatccattgatttcttttaaattatcactttattttatccctgaagatttctttttgagtactttccacacctatcctggcttcttcaaaacaactaccctttttttcttacttctgtgactataaggttgtattattggatctccttttttctcatcctaatttctgcctagatgatcaaacctgctccaatagaatcaggtatcatctctgtattgtaagctttgaaatatttgtctctgtctcaggtttcctcctaatttctaggtctatatttctaattattaaccaaagatttctatctggatgcccttcattctatgtaaagtcaaactcattatccttctctctttttccaaaccttctccctccctttgttgccaatcttggtaagcagccaagcagaaatcttagagtcattaatgacttttccactcttcctcacctcttacttccattatctagtaacaggatctattgattccatctcttaaatgtctctctaatccatctactctcttccctattttaatttccacttccttcattggatcttcattatttctttttgaaatattttgatcgcctcttatctagtctctatgctttggtctcacacaatttaaatccatcctcttaaatatgatgccatgggaaaaaaaaaaaaaacatccttacttttttttttttggctgcctactcattgcctggaaaataaactgcaagctctttgacattgcatttgagacccttacttatctgtttccaacctgtttttccagccctaactcatgcccacacccttctctctctagaatatgttatgcactttcagtttcatgccctggttcatggtgttccctctacctgttatggttgttcttcatttgtcaaaaacctctacatctttcgagcccatgtgatatgtgattttctctgtaatattttctctatcctgcttctgggtaaaattaacctctattccttatgttctcttctactgctattaaaattaaatttaagttgtagaagtgtttatctccttcactgtatcagactcaaaggaaaaagttgtgttcattttgattcacatatgcttaacacaatgcctgaccaatagagggtatccaataaatactgaactgaacaaatctattcctgatctgtgtaataaacagggagaacaaactttaagaataattctcatgcat

SEQ ID NO: 166 - DNA, 468 bp, Homo sapiens
atgcacaaattctttaagtgtaaggagtctatgcattttacagtaacttattttatgattgggagatgagacaggtatacattcaactgccattatttttattaagtgctttcattttctttacagttattacaaaattgtatttattttatacagatgggttttcattttcctgatgctgcaatggttacttcagcttgttgacctttctttgtgttatctgcatgttgtaacgtgtgataagaatgaatgtaaaggctgtggcaactgtaattaatttttgtaaagggctggtcacacgtggatctggtttatgaatgtatttgggatgattttagtaaccagatcaccttttcagaaatttagatgtgaacaccaaaagatgcattttctcaacaaaaattaatagctggttctatttttttaaacctagaaaaaataaagttgatttttttcaaaaaaaaaaaa

SEQ ID NO: 167 - DNA, 480 bp, Homo sapiens
cacatgactgtgatgcacaaattctttaagtgtaaggagtctatgcattttacagtaacttattttatgattgggagatgagacagttatacattcaactgccattatttttattaagtgctttcattttctttacagttattacaaaattgtatttattttatacagatgggttttcattttcctgatgctgtaatgtttacttcagcttgttgacctttctttgtgttatctgcatgttgtaacgtgtgataagaatgaatgtaaaggctgtggcaactgtaattaatttttgtaaagggctggtcacacgtggatctggtttatgaatgtatttgggatgattttagtaaccagatcaccttttcagaaatttagatgtgaacaccaaaagatgcattttctcaacaaaaattaatagctggttctatttttttaaacctagaaaaaataaagttgatttttttcaaaaaaaaaaaa

SEQ ID NO: 168 - DNA, 362 bp, Homo sapiens
agagcatcagatgaaatcaactgctgagagaggaaagtgagtgctgtgttggcaccgctgccagaaactcttgagaatgagcatcgtgtgccacttatccactgcttgccgacttcagtagcaagagcctccagaatgctcatggataaacatcatctttgtggccacacattgttttatgagctgagtcatcagactggctggctccttaaatgctgctgtgtgattctctaggcagcagaaaacaaggagagaagatatgaagtgtatctcatcgagctttgtagagggccagtatcattcaccaaaggtgatgggggatttaccattatggagtttgcttgtgataaaaaattattgat

SEQ ID NO: 169 - DNA, 157 bp, Homo sapiens
catctaaggtaatgagttaaacccaaaagtaacagtgacatgataagtgaaactgtttgcatactttgttttttaaattgctctatcatgtttatcttttttatagctactcaataagacattgcaatgaatttttaattaaaaccaatatgtctat

SEQ ID NO: 170 - DNA, 515 bp, Homo sapiens
gcctcattcatagactcaagaagcccaacaaattccaaactaaataaagaaaaattcacaactatagccatcattgtgatgctacagaataccaaaatcagagataaaaatgttaaaagccagtcaaagcagagtgagactctgtctcaaaaaaaaaaaaaaagccagtcaaagtacctaagaccaaacgttggacatatagcttacttttcaatggtaatagtgaaagccagaggacaatgaaattatatcttaaatatgttaaatgaaattagaattctatattcagtagaccagttgttcccaaccaaggtaattttgctccccaggagatactgttagttgacacaactgagaagggaagtgatacggtcatctcatgtgtagaggtcaaggaaactgcttaatgtcctacaatgcacaagacagccccaacaacagttatctggccaaaaatataaagcgtgccaaagtcaagaaatcatgccgtaacatatctttcaaaaatgtaaata

SEQ ID NO: 171 - DNA, 9417 bp, Homo sapiens
  SITE (3): n equals a,t,g, or c
  SITE (8736): n equals a,t,g, or c
  SITE (8737): n equals a,t,g, or c
  SITE (8738): n equals a,t,g, or c
  SITE (8765): n equals a,t,g, or c
  SITE (8769): n equals a,t,g, or c
agnaaaaaaagtaacatacccaaaactccttgactagaactatctccttttgtaaaggattttgagatatcaggcattagttgccttatttgtgagaaattttctgagggctttttttttttttggtggtggtggttgttcatagaagagtgttctttataaattatattattattgtattttttgaaaaatttatactagaaagtggtatatatgtctttgtatacattacgaccattgtgattatccattaaatccagtgtctgatgctattggttagtaatgatgtcccagcatttgatgttccctctctaatgataacaagtaaatatttaggtttatcccttttgaaagtttggttttacttttaacagtccatgaacagaaaattaaggcctctaaaatcagatcccctagttactcctctgttctgaatctggggaagtagtaaaccaaaaagacagggaaaaccagatatttagagtcgaagcagcatgcaaaaaataataatgtttttaactaatgaaggctactggagttactaagaatcacctaaaaatgtgctactgtaccttgctcattttgcagatttagaagctgaaacatgggttaggttacttactaaaagtccacctgtggcaacctgcaaataatgcttatttatactaaagatgagtttatctgatagagttaggaaatttcttcttttgagtaagagtattgctataacatatatttttttctgaaatgttttaaaatagaagtacacctaattgttattggttaaaaaaaaagccatatgtgaatgaggttggtttttgggttttttctttcctgaattgtattagtccaaaagaactaaattagggtacttgtgctgtaccaaaatggtaattataacagacagtattagaattactgaattaacaatgagaaagagagaagtgtatctgttacgtggatatatgggccagcctggatatacaacagagtagtaacctgtgaaacaaacatagaatatcctcttagacattgttcctcataatgcactgacagaattcacatagctcttaatgaaacaatttaagattgatgtacgtacgtttgacttggtctcgctgtcggttaactgtaaagttagggggaagaaagaaaaaaaattaaaagggtagacacagttgagagttttatttttaaaaagctaagtcttataattatgaccattaacttgctttggctttattgcagtgactttccaagtttaattattcaaaactttttgaactgactgaattaacttggtatttttaagttgactttttacataaacttctttataaaccttttataaaaaggaaactataccattactataaatggaaaatcattttacacatcatacctagcaggtaataaaatttaaaaaataaaaattaaatattagaatgtgagaaatttattaaaatgtagttctaaaaataagtttcttcctgagaagaatgatactgtttatgatgaatccatagtgaaaagacagtgacctctctttcatccagtctagtatatcactaaatcatcattacgatgtttggctatcaagtcattaattactgtcctcctttcactgagctttattcaaattttgacaatcagagcactgggaagaaataaattccacaactgcctttagccttctggatactttcttttataaaatagaaaccttttccacaccagttctgcagcagtcgctattagatgctcgtggtagaacccatcaatcatctggtcctctgggtactggtgagcatccctggtcttcatacctgtgagtgggctttgtggtgaattactgtaaatatgctaccctcacttttcttggcagttatgtccatgaaatcaagagtgtgatgttctagttattttttcttatatatatttttaaatgttcaatattcaactattgaaacaaatgtacatctgtgaactagctaaaatcatcttatgtaccactaatatgcccagcacattttgtaaaacagtcctgatttggcctccaagggtatttattgaactaccagcagtatctaggagaccacgaaggaataccacgaaggaatttatgctccagtgcttgccataatttgtctgagaaggaatctgttaaataaaagcttttatcctctaacctttaccttcatcagaccttataaaaggtcaaatggtgattcttaagttttttagtcacaaatcttacttattcagtattagtgcgaagagtagaatactttcaagtaagcctaaacttacatgaaaacaaattacataaatctagctctgagaataggaaattagtgacaagatcaatctgtaagatgttgagcacttatctcaagtaaatgggtaatgagtttcacatcttataaatacaagttagcatgtgttttctcaagagtccaagggttttcattattggactacagctttaatcttctaaatgttattccccaagattaaagagcatctcaagttagatcaccaaagatcaaaagctaaaaccagaagtatttttgtcattgtggtggtggtagtgttactaattgcctagatttttaaagggaaacatttttttcactgggttgtttcgttgaaaaaaatagaagcagaaacttgcccaaagtcacagtggtcaaactggaaattgcaccaaaacttggcatactggttctgaaatccatagttttagcccttatgtatactggttaatttggaaggaagaaatatatacgttctgaagtgaagagtgagtgaaaggaagaattcagtgaatacattgataccttgatattatctgcattgtggctacgtgttacttttcttcacaagagtgatataagtgaaataaagaatgattggactgggagaaaaatggctcagaaaactttgcaaaagtacgactgtatgtaaagataagtattcaacattaaatgggaaggaggagagcaagcagtttaatatatagaattttataattttaggcctgcaagggaccttataaaacatgagcaatggaacacttttttccaaactaaatttcgtgcagtggaacttggccgactctgtccttcctctattctaagcaccctactctagcccggctgctctgagttcagtttgttacaaatatggacacgaaagtaccacaggctttgcacagcttaattgaagtttccccttcacaccatggtaaaaaaacatactgggatggaagggcttgtgtctagaacaagaacaagaaataaactcttggtcacttactaatatttcaaaatcacaaagcagaattttgcttggatgtttagtaaaacatccttggaaatttaactgcttgcagcttctacacttcttcattaaatgctgtctggctaataaaaagtgccatgttgcagctttattttattttcagtttttggagatagaccctcactgtgtcacccaggctggagtgcagtggtacaatctctgctcactgcaacctccacctcctgggctcaagtgattgtcctgcctcagcctcctgagtagctggggttacgggcgtccaccaccacacccagctagtttttgtatttttagtagagggggtttttgccatgttggccaggctgggcatggtggcatggtaatctcagctacttgggaggctgaggcaggaggatcgcctgaacccgtgagatggaggttgcagtgagctgagatcacaccactgcactctagcatgggtgacagagcaagactctgtctcaaaaaaaaaaaaaaaaaaaaaaaacgaaaacagaattctgtttgtttggatgacctgttatacttatttttgatcttgctgaaataagcaaatcttaggaatcttagtctacagtttctgacagttttttttgttgttgttgtttgaccaattagaactaaataaaaagaacgtgattttcacatttaaatttctcttaagtgtattcctagaacagtaagccattggtttaattgctacttgatgccagtttccttgaagatagccgttaagataaaacatggtttcattgttaattctgtagaaagttacatgttactattatgttattctattggtgtattgttccttttactcaccacagagattgtccaaacacttgtcattattggggcaggcactgcaggtggctcctctcttatatggccaagttgggtaattccctctgtaaagcagaagaaggatgtccattagaagtttttcggttttttaaaattgcaatttactatgaatccttaactaaatccagaagaatagtggagtgaagtacaaaggtccagagagttggtaatagaagtgaagacaggaaggcagaaatggaaggctgctaatatttgcatagttcattttatgtacctgtgtctatgcacctgttttaatctgcatcccatttaattgtgacagctctgagaggaagttatcttgttttacagatgagacaaaagatgtaagagatacctttaatcacaatttatacacttcagagtcagaggaaacctggatttaactccagggctgtgctccctctctttacctaccctctggcctatatgattactgccattcaaaaaactgtccatcttagaaaagctatggtgacccacattcaatattctcagttggtcagccctccataattttcactggataggagccatttggctggtgccttccaaaaaaataataaataatggtatgggggaatttctaaagtacaaattgttttcacatacaagatgtgatatgaataatagctgctaattagtgagcactaccatgtgcttgtctttgttctaaacaaccttgaatgaaataatcttcacaaaaaccctatgaggaagttactgttgtctatttatacccattatatagctagaggctgagtcacagagtataagtaattgaccaaggtcacagactagaaagtgaaataatatccaagcattttatatccccataaatatcctcatagtagtaatggggagagggggcacatttatctcaatgaacctgccattgcactaattttttttggaactctgcttttggaaaaagttctaaacttttttgtgtaatcgtaccctttggcagtctggtgaggcctatgggctctttctcaacatagtttgttgttaaatgcataaaatacataggattataaaggaaaccaattaaattgaaatagttatcaaaatgtttaaaacaagatttgtgataaagtaatatgtgcttctctattaagatctaccgggggctattagtttcaatgtagtgatgaacacaaactatattttgagttctctgcagcaagtggaatgtggtatgaaaatatctgatatttacaaagatgatactgctaagtcagagtcacgtttattgctaatatgatggtggagtgttgtcttcattcataatgaaaggaaatgttatttttaatagaggttagtgaaaataaaaataaaactattttctaatcaaagtttatggtcctcctctccccagcactctacaattacctccaaagttgagaactctcaccttagacacacaactttataacgataccttatttccaaccccaaatctatgttcttatctcattttgctccaaattttaagttgcttcagaaatttaattagccctctgcttactctacaccatggaaaaaaggtaatatagtagaaattctgatagcaatttcaaaagatgtccaaaatagacattaatcattggaatgtctttcattgttaataagcacagtattaagtggtttaagttctagaatgattttaataaagtcatttatgatacttagttgtgcattccaaactgtaaaggaaaaggtaaaaaatgctacttaaaaataagctaaaaaccaagacagtcggtgaggtctgtggaaatggtagtattcatcttgggagaaacatgctactggaaaggcctggatttgtctagatgggagtcattaagactgtgggacctaaagtattcagcacaataaagcaacaggacatttcaatgttttccctggtagcctgagagagaagagggttggggttatgggacccaggggaagaccgaagacaaatctttaaagaaaaagataaatatgggtaagggtccctaaggcagtgacggcctaagcacactggtactatcttgactatcttgtggtcaaagttatttcctcttctgtgctataatcctctcctccactaatccactctgagtaaagatctgttacacaccatacccttgttcatggtgcccaggggaaatgaagaggagagtattacaggcaactggaagattaagcatcccagaccccattctgaggtatcagaaatattgaggaggatactggacttcctaagattatgtggaatgggggcctacaactttttgtgtataggaaaataatacctcagagggcagagggcaaagggaaatgaggacattcctaactggtctctctgttttaccttttatgctcctctaatccattttccatccagactgatgtccaaattaaaaggtctcatcgctcccctgcttaatatacttgaatgacttcttatgtaaactttgtcatgatctaaaagttcccgctagatctgcaactgccttcctccccccgtttcatctgtttagcagaccgagggcaccagtctctgtggtttaaacttgccaaacttttcttcacggaagttttgctgttcttttctccactagacagctgttccagaagttcttatgtctgattccttctcattcttcatgcctaagcttaaatataacacaagaagcccttccctgattatgctaaacaggggccttgcctattgatagtttctattacagtattatttatagttccttaattgccccataatgatgcagttattttacttgtatttttattatctgtttgccccataaatattactctcataaagacagagactgccctgttctcctttggagctcagtaaaacaaatatttgttgaataaatgaatatttgaagttagtctttatggaagcattataactttggttgtaagttttataatttaatattgtttataactctgaagataagtgagtctaaaccaggaaaatttacatttatactttaatgaataaaaatcatgaatacttacaaaacattcactattgccaagcattatatatacctagtattttacaaagccttctcttgtcactttcatagctactctaagtgatgggtcctgtaaccctgatctattggaggttaaactgagattcagagttaacttgtccagggtcacacagtaaattaattgtatcttaaccattaaaaatgtcatatgaggccgggtgtagtggctcatgcctataatcccagcactctgggaggctgaggcaggtggatcactttagcccaggagttggagatgagcctgggcaatatggcaaaactctgtctctacaaaaaaattaactgggcatggtggcatgtgcctgtagtctcaggtactaggaaggctgagttgggaggattgcttgagcctgggaggttaagcctgcagtgaaccgtaagcgagccactgtactccagcctgggtgacagagtgagagaccctgtctcaaaaaaaaaaaaaaaaagtcatgaaaagttaccactaactgaattatggctttgtctagttttttctgggttttctttattttccaactcttaagatattaagtcaaagctgtcatcttctgaatgacgctttgtctcctccttcacacctacagcactcagtcagagtatcgagcatgtcttctgcacattacaccagggaaatggctttctttcagccaatctccaggaatccaaaaattcaaaggcaacaaattaaagatcattatatatattgcaaatggttaaaaacctttaaaatataaaaacttttataaataagaaaatctagtagaaaaatggtcagcccacatgattcacagaaaaaggaatataaatagacaattatgtgaagaaatttataattactagtaatcacagagatgcaaaagaaagcaaatgaaatgccatttccatcaaattagaaaatactaagaaattataatacctagtactgatggtgaaatacaaattgatataatggtggaatgtaatttggcaatatgtacttaaaacaaaaatggtcacagtctttacgtgctagtatctcaaggaattatagggaaatagaagtgactgaagatacatatatgaggttgttcatcatatattaaatgaaaatatagtgaataatctaaattcttcaacaggatggtggtaccatcaagagcatggactctggagctagacagccagatcaaagtccatcagtgatagtcactaactgtagaactttgggcaggttgctgacccgtgtgtgccttgctgttctcatttgccaaacaggggtagtaataggagccatctcataaacttctggtgaagattaagttaatatatgtgaagcactttaacagtgctgagagcattgtaagcattatataaacaatctatcatttttatgattaaaatcacttaaaattttgaaaaggaaaattttcacagcatattttaaggagaaaaagaaaatgtatannntcagtaggatcagatttctaaatatgngtangacacaagcacacatatgtaagtataaagaaagtaggaggaagtgtttgccctgtttcccaaagtgggaactatatctgttttaaaaacaactgtcaaaagtaaatgaaataggttatataagttgaggaatctgttttgctttgaaaattgtgtaaaattgccaagtttctaataaaccaataaatataacatcagttcttccactttgtggtattaccatatacaatttatgtccctgatgaatattttagtcttaccactcttaaaaatatgtgcgtatgtatttaggtagtatatataaaggatgtacacacacacacacaccctctctctctccaagaaaaatgtaccagaatgttaattaagtatatctctgggcagaagaattaaaggttatgttaattttttatttatactttatccagattttctataatgaagaggaatactgctaaaatgtttttttgttgttgtttttttttgggggggggggggcgtttcctataaaccggttgattcaggcacttaccctggtccgtagttgcatataaaatgtgctccattggaaagagcgtcaaagccagaaactttagggcaaaattgaactgcgcagccaactttgtaactatctgcccaaacaacctga

SEQ ID NO: 172 - DNA, 797 bp, Homo sapiens
aaaagcctaaagaagagagtatttaaaggtggatacagccagcaattaaatgcactcatttttacagcagtaccaaattacattttaaattattttttactcataagtttttgagcaattttgtcataagaactgtgccaaatacattcaaaattgagtgagctagaaccagtggtacattcacaaaacttagaaaaaaagcagtcatgaaactcatcaggtgagggtttgaccactgtgaataggcagtggaagatgctaagggcatatatggcatggtgcctttctctgaagaaatgaggtggagctggagctgggatgagctggtctggagtcttccagcagagggcaacatcctgtgtgatccctgggtgggactgacccattcacagaactcaaagaaaagccagtgtggctgcagaaaatgaagaagtttactttaaaaataaatgaaatttactccctgtatcaggtgtttgaactagagcaactccatcttggtgttgtgtttttttgttgtggttttgtttttttgtttgtttgtttttgagacggagttttgctcttgttgcccaggctggagtgcaatggtgcaatctcggcttattgcaacctccgcctcccaggttcaagcgattctcctgcctcaggctcccaagtagctggaattacaggcatgtgccaccatgcccggctaattttgtatttttagtagagatggggtttcactatgttggtcaggctggtctcaaactactgacctcaggtgatctgcctgcctcggcctcccaaagtgc

SEQ ID NO: 173 - DNA, 20268 bp, Homo sapiens
attatagctacctgttaaagaatcatctggattatagaccagtggcactgttgtttcacaagatgatgtttgaaactattccaatgttcagtggcggaacttgcagtaagtgcttgaaattctcatccttccatgtattggaacagttttcttaaccatatctagaagtttacataaaaatttagaaagaaatttaccacatttgaaatttatgcaggagactatatttctgaagcatttgaacaaattaattagctttgttgttcaactcattgggctaaagaagccaaaagcaatgggttttaatgtagtcgaagccaaattatatttatgaaagaaatattctgtgttataaccaccaaatacagcccaattctgactagatgatggaagaacctgtcccatcagaggtccagcatgaggtccagcagaggtccaccagaggagttcagcaatttgctgctcttagggcagggatcaattccttaatatcttaggaagactaggtattgacagtaatggtgacaaagcaatgaaaaggaaaggaagaagtgataagacatggcagcaagctgaagtatgatgagtaaagaataggaatcaaagtatgtggagtgttagagaaaacctggatttagatccagattctagtcctatctctgtcattaatctattgcgtaaccctgagcatatcatctacctctctttgagtttgcttgtcaataaaatgaagagactttgaaatctgagacttcctggataagtactaaatacagattatgtcactgatgtctgcctctatttatttctcccttttaccctaatctctataagtctacctcagtcatcctgatcctattctacttctctgatgttgttgtcagataggtgtgatcatcctcatcagatcttttctgtattcttagagacagataactttatcaaagaccacagatttattagtatagcatgttaaagtcttctaaagagtctcattgatgctcttttcatctcagtacaatttttaaaactgctgaatgcaaggtactgagctgttggaagtgactgacagatgaatgtaacagattcatagagaaggaaaaaggaagaaaaactcatgctcttcctatagtattgatatcagtgtaagagccaagagaaaggtataaagtatcatgcagatattaagggaaagaaaacattcactttagtaatctttcctcattttctagtttcctcttatgtactatgatttaatactgtagtaaagttttaataaaatatgagctatatgtaattaagtgggaggttgtggggctaggcacgaggctcacacgtgtaaccccagcactttgggaggctgaggcaggcggatcgcttgatctcaggagttcgagaccagcctggacaacaaggtgaaaccccatctctactaaaaacacaaaaattagctgggcatagtggcacacacctgtagtcccagcttcttgggaggctgaggcaggagaatcgcttgaatccaggaggcagaggttgcagttagccgagatcatgccactgcactgcagcctggacatcggagcaagactttgtcttagaaataaataaataaatataaaataaaataaatgggaagttgtgtatataaattataaatgctacattcagaaaagcttttgaaggttgtcagacagtttcttaaaggaagttcaccagttctttattgaacattgaagaaaacatacagtttagactggcattaaaactgaaagaagtggccagacgcagtggtagacgcagtggttcacgcctgtaatcccagcactttgggaggtcaaggtggatggatcacctgaggtcaggagtttgagatcaggctggccgacatggtgaaaccctgtctctactaaaaatacaaaaattagccaggcatggtgatgcgtgcctgtagtcccagctacttgggaggctgaggcaggagaattgcttgaagccgaaggtggaggttgcagtgagccgagattgcgtcattgcactccagccagggcggtaagagtgaggctccgtcttaaaaaaaaaataagtaaataaattaaaaactactgaaagaagtattacaggcaatgggaaatagcttgagtggaagtgcagcagaaggaaaaagctggacaagaatgtagtgtcagagaataggtatggaacgtgtgagtgactgttagaggatcttgaatggggataacagacttgatttcataaatactgagatgtcatgataatacttgaggactaaaccatgttttaaggacagttgtatgcaaagttgtaatcgcaagaggaaaaaatagtggaaaagaaaccagtaataaaacttgccttaatgcaggtatgctaagacaatcaaatgggatttcattaattttttatttgccatttatagccaaagattttgtaaaagttttgagcccagtcaggtgaaatagtctcagaaagaaagaaaagtgaatctgagacttggagacattaatgttgatattttggttttaaacgtgttttaaatccggtaaaagtgagcttctcacatgacaatattcagtgggtacttgggagtatgggttcgaatctaggtaggagatatatcgatattttgggcatcatcaggaaagggagagtagttaagcctttcatataaataatggtgtggcgtttgggcatgggaagtcttggaggaaaggaagaaaaggagagggtgaggactgagataagaatggcaacttgggtttaggaagaagaagaggaatcaatgtagagaacagatagtgctgaaaaatacagcatcttctgtagggattggcagctttttcttgatttttgtcttaatatttctaagagatggaaaaagctactatattctagacatttaacagggttaaaaatgttactaaaagatgatcaatgtggttttcattcaagactataacaatatgtatatatccaaggaaatttaattctgacttaaaaaaattgttttgcttgtatagatttagggacacaagtgtaattttgttacatgcatagagtgtatagtttcaagtcagggcttttaggttgtccatcatctgaataatatacattgtacccattaagtaatttctcatcttctactcaccgtttcaagtctccactatttatcattccattctttacattctgattttcatttactaggtgtattagtctgtttttgcattgctttaaagaaatacctgagactgagtattaaacaggtttaacctgttttctttatgaattcttctttaattggctcatggttctgcacgctgtacagaaagcatagcagcatctgcttctggggaggcctcaggaagcctccaatcatggctgaaggcaaaaggggagcatggtgagaatgggagcaagaaagagaaggagtggtggggagaaggtgccacccacttttaaatgccagctcacttaccaccaagaggatggcccaagccattcatgtgggatctgcccccatgattcaagcttcttccaccaggccccacctctagcactggggattacaattcaacctgagatttgggagggaaagatatccaaactatatcactaggtctggatcttgttatttattttttggaacatagtcatatatatccaaggatatatattgtagaagtccacagaaccatactaatattggacttctgcttagttaggtcttatctatctgaaacatgatattcatattgcagagaagattattttctttagtgattgaggaaatctttactacttatacatttttaatataatactataatatttgaagatgcacattttagatgtagtttaattgaaacctggaaatactattaatttgctttttaaagtcctaaaatcaggattatcagattctgaattaatggagtttaaatcaaaaagattacaaggcagtttttcagttttattctggttaattttatcacagctttggaatcctactttgtttatttgcttcttgaagttagatttcccagtgaaatttcagtatcacataaagtcttatgaaatggctcattgcactttgaactttgagtcaaggaagtgaaatttattgatagattgttggtgtaatatttatcctgtttgtggtagcttttttgaataataagtgtcttagaagaccatgttggagtagcctgcatgcttttatcaaacatattaattatgtgatggctgatactgctttagatattacatagaaatagtagtaggtgtttactaaactggaaatttcatttaacttggtttagctttgccttgttctcagtcacattgataaaaatgtaagacttttgtttatcttttagaataatgacaccttttggtgctgagaattttttgttttatatatatatatatatatacgtaatataaatacaaaatatatttaaatatgtataatatttctcatacactttatgtaactttgtgttcctgtttctctattatcttggcatgttttcttcaaatggcacttcttaacctcctaaggttaataaatttctttgtaatggacttttgttttctaattcctcagcgtatgacaaatgaattatactttgtcaaattatttaggtaactttcagtttttgaagtcctgggatcataacattcatcagtctttaatttctgtcattaaggtcattagctataaatgaatttatgagtagatttaaaaaataaaacatacaatccttcccttaacacactttcccaccatttggttcaactgctagtgtaaaagcatgatgaattttgagaagttatattttaccagttactttattttttaccagttatttaaaacagacatgagccaaagccagaatacttgttaatgaaaatgaggtgttttggaggaaaggaaggttgtgctgcagtttttacttgaaatctgttacatttctttacagaaatttcaaatctcttgtttcctgttatgatggtggcattatatacctttaaaatgtgagctataggaaaatgaatgatggttaattttttaataaatatttagacttgtgtttttgaaattttttataacattgttataggttttatcctctttctcttgtgaacatgtagtgatttgtattttgtgatctttgccgcatgctagagacttaagaatactatagcaaatatctgtcttctttacatttaaaaatttttcgtgactactccctgttgatatctgtcttaaaagttacttttgatgtagttcacaaatgtaccagataattatttcatcgtttttaatgcttaaagtttttatttgtattaggatttttagtatgattttaatgttaaagttttgaagttactctgccactagaagtctaattttgggacttactattcatgaaataggaattgacttttatataagtaataggaccttattttgaaggttcaaactggagaaaatcttacattgtttatatttttatttcatttatttcagttgatttgcttgagatcaagattgcagatacagaatccatatttcgtgtatattgctgatattaatcattaaaatcgtttttgacagtttgacagttaaaggcatttcctgtgaaataatactggtatgtatttaaccatgcagatcctcagtttgtggtctgccagctaaaggtgaagatatattcctccaattcaggacccacacgacgggaagacaagttcatgtactttgagttccctcagccgttacctgtgtgtggtgatatcaaagtagagttcttccacaaacagaacaagatgctaaaaaaggtttgtactttactttcattgggagaaatatccaaaataaggacagattaaaagctatattttattttatgacatgtaaggaactataatttgttttctattagatctgcaggtgttttgcttactctggcattggtgagacattataagggtaaataatcctgtttgaaggaaaaggccttatggcattgtaacatgagaggaatttttcttaacaaggatggttaactgagaagaaattagcatgggaccaatattttaaaaattttggtctataggtagaaatgagatctgttctgtggtcttatgtagtgacacaaaccactttttctccattttggcttatgtttctttttctttccttttttttttttttcctttttgttagagacagggtcttgttctattgcccaggctgagtagctaagactacaagcatgtgccaccacacccagctaattttttttatttttatttttgtagggacagggtctcactatgttgcccaggctggtctcaaactcctgggcacaagcagtcctcacgctttggcatcccaaagagttggaattacaggtgtgcgccatcatgcctggccttaacgtttcttaagacttgattattttctatttagcttctgtggatttactgattaattttttaactaggagagaaatcagtatgaagaggaagtaataaagaatgaaaacatggtatttaaatgtgcaggtttagaaagttaatgaagtttgaatttgattgatctgtatttagagaaggcaacgtcttattattttaaaaccaactatccgccctgtgcggtggctcacgcctgtaattccagcactttgggaggctgaggtgggcagatcagctgaggtcaggagttcgagaccagcctggccaacatggttaaaccccatctctactaaaaatacaaaaaaattagccgggtgtggtggcaggcgcctgttttcccagctactcaggaggcttgaggcaggataattgctgaacccgagaggcggaggttgcagtaagccaagaatgcaccattgtactccagcctgggcaacaagagtgaaactccatctcaaaaaaaaagaaaaaaaaaacaacaactatcttcatttaaaatattaaatgtgaatatttaaagtgagactaaggtgcaacatttttagatagtaatgaagaaaaggactaactttgtagtgttgctgccttgttaaacatactagatagcatattgccaatctttaaacattctcaatgataggatttatttactttttctgatttttagcttttcttttgaaagaaaataagaggaagtttcatttactgcaaaattttaaatgctgctttgatgtatcagtagagatataattttcctttatccagaatccaagtagctggaaaaaaaaatcaaaatatgctgaacttttttttttttagccagaaacccatttcctatcgtctgtacaaataaaagttaaatatatctcaataacttagaaaaattattttttgataatccaggaagtattagcaactgttttaaaattaagataactagtaagttttatttagctttcaaaaataggcatctacatcatcatctctgcatacctttaggaatttcctaattcttatttcccttcatctgtactttaacacatgcaaaattgaaggttagattaaatatttatgatttatttgtttatccttgactacataaatttccattttattgattttccctgccttatttaagaatatgctatgattaaaacacaaaaaattttagtataacccatatatatatagaattcacctttttgttatttaaatattattggcttattttcttctaagtaaaatacaattactggctaaaataattgaaataagcaaaaaaaaaattttaaagaccttgtatacaagattactttgccaggtactgttaaaagatgcaatgacatttaagacgtaacatccttaaggatcttattttctgggggataaaaaactttaagataaattagaataaaagatttaaatggcattttaaggtaccaggtaccagataagatgtcacaaggctgtatatcattaattgccaaatgatttatacaggccagatttctttgttggtcaatagaggtttaaagtgatgaacttctgttgtgtttttttattaagaaggtattatcttattagtaagaagtgattttttttaagaacaagcattttataacatcaaaagaaatcagtagtactctttcctaccccctcatatttattctgaaagtattcaagcattatattgtcatgtaagaaactggagcttctcatgtttgtattgctgtagaagtaaacatgtatttgccatgcgtcatcagggaagttgcactcaccgtccaagaacttttgttaaagtaaatcttggaataggtagctcatttgaaatgtagaaaaaattaaatccatatctgaattttgtttatatgtatgtacacgtaaactaaaaacgtatttaaagctagtattagatgagaaaagaggtttttttacttaaaattttaaggcaaaagtagtttatcttagatcttgtgagattgtatttttggtttaaaatttgagaatttgagtgaagaaaaatcatgtgaatgaaaatgcaacagataactcagattgccttataatagtctttgtgtttacctttattcagaatatcaaatgatagtttattttgttgactttttgcaaatgtttaacataggtgacagattttcttttttaaaaaaataaaacatcattaattaaatatgtcatttcatttctttttcttttctttttttttttttttaggacaaaatgtttcacttttgggtaaatacattcttcataccaggaccagaggaaacctcagaaaaagtagaaaatggaagtctatgtgatcaagaaatcgatagcatttgcagtatagagcgtgcagataatgacaaggaatatctagtacttactttaacaaaaaatgatcttgacaaagcaaataaagacaaagccaaccgatacttttctccaaattttaaggtcagttaaattaaacattttgtgggggttggtgacttgtatgtatgtgatgtgtgtttaattctaggagtacagctgatgaagaacttgcttgacaagtttttaacttatgtattatttcgaagcagtgtttacgtagcagtaacatgaaagtttctaataaaatacccaatgtacacagcgtcaaaaaagctgcatttttccttttcctaattctttgttgtttgctgaaatctggggcaaaggtgcgggagggggctaaatgactgggatatgaagtaggaatgggagaggaaagaaatagatgggaactcagtcatttgggaatgattcatatggaatgtttttactgcttccactcctgtctgccttccaatttattctcaatccctcagagtgatcttaaaaatagacttgattgtgtcacttctgtttacactttataaggaccttgtgtttttttttttaccatgacctacaaggcccagcataatttagcacagggctacctcctacatcagcactagtcaccttctctccttgtttcttgagattcagtcatactggtctttcttcagttcttcaaaatgctaagcttctgcctcttctagtctttccagttattttccttctccctgtaccttttcatctcagccttttcccctgaccttccatagctatcttcatatttccagccttagcttcaatctcatattctctgaagtcctttgattgtcctcccgttattctttttttaaaaatcctatttccttatattgtatcttagaattatttggtttgtttcatttttgcctatgtgtgatatatgtatttctacataggtatatatatctacttatagacaagaattcttcagattaaaaaaatctgatttgtaaacattcccaagtggttgtttaccatttttttcttcccccttcctatttcttattctacctgattttcccctgttcattcaccacactcgtttctttctcttttttactctctcttaatttttcattcaatttttataacatgtaataaatctaactgtagcgtctgagtattaagaatattgctagtaatacttcacctgtaatcccagcactttgggaggctaaggcaggcggatcacttgaggcccaggagtttaagaccagccggccaatatggcgaaaccctatctgcactacaaatacaaaaattagctgggcatggtgtcgcacacctgtaatcccagctacttgggaggctgaggcacaagaattgcttgagcctgtgagatggaggttgcagtgagccgagatcacaccagtgcacgtgcacttcagcctgggcaacagagcaagactctgtcttaaaaaaaaaaaaaaaaaaaaatatatacacacacacacacacacacacacacacacacacacacactattactaccaatatacatacatatatgtatgtatgtatgtatgtatattggtagtaatagtaatacttgggcccctgcacgttttaagtgaaaatagatctaatattaaatgtctttagcccttaaattttttttaagtgttcagaagtttccctttaaaaaaatttttaatatataataattgtacatatttatgggatacagagtgatattttcatgtatgcagtgtgtgatgatcaaatcaggataattagcatatggatcacctcaaacatttgtcatttctttgtgttaggaacattcaaaattctgtcttctagctatttgaaaatatacagtaaattattgttgactagttacagttctatagaacactataatttattcctcctgtgtgtaattttttatcttttaaccaacatctccctatcctcccctcccactccctttcccggcctctaataaccacactcttatgagctcaacttttttagcttccatatatgagtgagaacatacggtatttatctttctgtacctgacttattttacttaacatcatgtcctccgggctagacattctctttagaatccacaggtttcctttcttttctctaaatctgcattttgctcagccattaacttttaaaatgtctttttccctttagttttattgttttctattttaatattgcaagatgttttatatttgtgattacaaataaaaactccattattagtaaacaaatacaatgtcatatagtagtaagtgctataaaaaatagacaggatagaaagtaatcttggtttgtatgttttttgttttttagcaaagatgattagagaaggcccaaccaagcagataacatttaagcagaggcctaaatcatataagtgagttatacaaatatctgggaaaagagttaagagtacagatgcaaaagcccttagacaagagaatgagcttggtatatctgaagagtggataagtcattttgactgaaacagagtggacaagaaaaccagtccaagtgtaaagatactagtgtgtgttcagcataggaaggatgtaatctgaattttgtgtttaatattccctgtgttcatgctttcaaaatacagatgagtgaggaaagtagggagaaggggtaataaaggaagctgagagatcagttaagaggtacttgaatagtttagtaaagatgagagaagatgtttgcttcttgttgcccctcactgcttagaatagtggcagtgaagggtaacaagaagctgtcagattaacttaaagagtttactgatgcagtggatgttggttgtaagagaagaattgataatgactcttggataataggggagggaggggctgtcaatataatataatgaagaagggatttgaagtcatttctgatttaaatctcacatccactacctacttttaatagatatgtagcctttaacaagttccctaacctttctgggccttagctacctccccttggaaatggaaatacctaacatgtaaggttgttttgacagttattttcactaggcatgtaaaggcacttgactctctgttatagaccactgtattatgttaatgtccctctccttcctccctttaggtaaagtttttagggctaataaatcccaaatatcaatgttgatcagtagtttgtgtttgtgtagtgttgtttatatcaaaaactacattgaagccgggcacagtggttcacgcctaaaatcgcaacactttgggaggccaaggtgggcctcccaccttgaactaaggagtttgagaccagcctgggcaacatggtgaaatcccatctctacaaaaaatataaaagctagctgggtgtggtggcatgcacctgtagtcctagctacttgggaggctgaggttgatcctgggagtttgagcctgcagtgagctgtgaagatgccactgcactctagtctgggtgacagagcaagaccctgtctcaaaaacacacacacacacacacacacacacaaagaaatacattgatttttcacataggtagtaagagaaacattctttttgaactcagctgtttgtgaattgaattttgtaattcaaatgctatattatgtaaactattgatgactttcaatctgcatttattttgtataattatttagttaatatttgccacttatattccttaaaaaataaaattgaggttgggcgtggtggctcacacttgtaatcccagcactttgggaggctgaggcaggcagattgcctgagctcaggagtttgagatcagcctgggcaacatcatgaaccccatttctactaaaatacaaaaaattatctgggcatggtggtgtacacctgtagccctagctgtttgggaggctaaggcacgagaattgcttgaacccgggaggcagaggttgcagtgagccaagatcatgccactgcactccagcttggcaacagagcaagactcttgtctccagaaataaaaataaataaattgtattaacatcctgatagtttatctgtttagtacctagcaagaaagaaaatgttgaacatcttaagaagagggtcatttaaaaggcctcttaaagatcatgtttgttacagtgcttaaaaattaatatgttcatctgcaaaatggaataaaaaatctgttaaaaatatatttcactaaatagtttaagatgagtcatatttgtgggttttcattttaaattttctttctctaggtgaagctgtacttcacaaaaacagtagaggagccgtcaaatccagaggctagcagttcaacttctgtaacaccagatgttagtgacaatgaacctgatcattatagatattctgacaccactgactctgatccagagaatgaaccttttgatgaagatcagcatacacaaattacaaaagtctgaatttttttttatcaagagggataaaacaccatgaaaataaacttgaataaactgaaaatggacctttttttttttaatggcaataggacattgtgtcagattaccagttataggaacaattctcttttcctgaccaatcttgttttaccctatacatccacagggttttgacacttgttgtccagttgaaaaaaggttgtgtagctgtgtcatgtatatacctttttgtgtcaaaaggacatttaaaattcaattaggattaataaagatggcactttcccgttttattccagttttataaaaagtggagacagactgatgtgtatacgtaggaattttttccttttgtgttctgtcaccaactgaagtggctaaagagctttgtgatatactggttcacatcctacccctttgcacttgtggcaacagataagtttgcagttggctaagagaggtttccgaagggttttgctacattctaatgcatgtattcgggttaggggaatggagggaatgctcagaaaggaaataattttatgctggactctggaccatataccatctccagctatttacacacacctttctttagcatgctacagttattaatctggacattcgaggaattggccgctgtcactgcttgttgtttgcgcatttttttttaaagcatattggtgctagaaaaggcagctaaaggaagtgaatctgtattggggtacaggaatgaaccttctgcaacatcttaagatccacaaatgaagggatataaaaataatgtcataggtaagaaacacagcaacaatgacttaaccatataaatgtggaggctatcaacaaagaatgggcttgaaacattataaaaattgacaatgatttattaaatatgttttctcaattgtaacgacttctccatctcctgtgtaatcaaggccagtgctaaaattcagatgctgttagtacctacatcagtcaacaacttacacttattttactagttttcaatcataatacctgctgtggatgcttcatgtgctgcctgcaagcttcttttttctcattaaatataaaatattttgtaatgctgcacagaaattttcaatttgagattctacagtaagcgttttttttctttgaagatttatgatgcacttattcaatagctgtcagccgttccacccttttgaccttacacattctattacaatgaattttgcagttttgcacattttttaaatgtcattaactgttagggaattttacttgaatactgaatacatataatgtttatattaaaaaggacatttgtgttaaaaaggaaattagagttgcagtaaactttcaatgctgcacacaaaaaaaagacatttgatttttcagtagaaattgtcctacatgtgctttattgatttgctattgaaagaatagggttttttttttttttttttttttttttaaatgtgcagtgttgaatcatttcttcatagtgctcccccgagttgggactagggcttcaatttcacttcttaaaaaaaatcatcatatatttgatatgcccagactgcatacgattttaagcggagtacaactactattgtaaagctaatgtgaagatattattaaaaaggtttttttttccagaaatttggtgtcttcaaattataccttcaccttgacatttgaatatccagccattttgtttcttaatggtataaaattccattttcaataacttattggtgctgaaattgttcactagctgtggtctgacctagttaatttacaaatacagattgaataggacctactagagcagcatttatagagtttgatggcaaatagattaggcagaacttcatctaaaatattcttagtaaataatgttgacacgttttccataccttgtcagtttcattcaacaatttttaaatttttaacaaagctcttaggatttacacatttatatttaaacattgatatatagagtattgattgattgctcataagttaaattggtaaagttagagacaactattctaacacctcaccattgaaatttatatgccaccttgtctttcataaaagctgaaaattgttacctaaaatgaaaatcaacttcatgttttgaagatagttataaatattgttctttgttacaatttcgggcaccgcatattaaaacgtaactttattgttccaatatgtaacatggagggccaggtcataaataatgacattataatgggcttttgcactgttattatttttcctttggaatgtgaaggtctgaatgagggttttgattttgaatgtttcaatgtttttgagaagccttgcttacattttatggtgtagtcattggaaatggaaaaatggcattatatatattatatatataaatatatattatacatactctccttactttatttcagttaccatccccatagaatttgacaagaattgctatgactgaaaggttttcgagtcctaattaaaactttatttatggcagtattcataattagcctgaaatgcattctgtaggtaatctctgagtttctggaatattttcttagactttttggatgtgcagcagcttacatgtctgaagttacttgaaggcatcacttttaagaaagcttacagttgggccctgtaccatcccaagtcctttgtagctcctcttgaacatgtttgccatacttttaaaagggtagttgaataaatagcatcaccattctttgctgtggcacaggttataaacttaagtggagtttaccggcagcatcaaatgtttcagctttaaaaaataaaagtagggtacaagtttaatgtttagttctagaaattttgtgcaatatgttcataacgatggctgtggttgccacaaagtgcctcgtttacctttaaatactgttaatgtgtcatgcatgcagatggaaggggtggaactgtgcactaaagtgggggctttaactgtagtatttggcagagttgccttctacctgccagttcaaaagttcaacctgttttcatatagaatatatatactaaaaaatttcagtctgttaaacagccttactctgattcagcctcttcagatactcttgtgctgtgcagcagtggctctgtgtgtaaatgctatgcactgaggatacacaaaaataccaatatgatgtgtacaggataatgcctcatcccaatcagatgtccatttgttattgtgtttgttaacaaccctttatctcttagtgttataaactccacttaaaactgattaaagtctcattcttgtcattgtgtgggtgttttattaaatgagagtttataattcaaattgcttaagtccattgaagttttaattaatgggcagccaaatgtgaatacaaagttttcagtttttttttttcctgctgtccttcaaagcctactgtttaaaaaaaaaaaaaaaaaaaaacatggcctgagagtagagtatctgtctactcatgtttaattaaggaaaaacacttatttttagggctttagtcatcacttcataaattgtataagcacattaaatagcgttctagtcctgaaaaagtccaagattcttagaaaattgtgcatatttttattatgacagatgtttgaagataattccccagaatggatttgatactttagatttcaattttgtggcttttgtctattattctgtactctgccatcagcatatggaaagcttcatttactcatcatgacttgtgccatataaaaattgatatttcggaatagtctaaaggactttttgtacttgaatttaatcatgttgtttctaatattcttaaaagcttgaagactaaagcatatcctttcaacaaagcatagtaaggtaataagaaagtgtagtttgtacaagtgttaaaaaaataaagtagacaatgttacagtgggacttattatttcaagtttacattttctccatgtaattttttaaaaagtaaatgaaaaaatgtgcaataatgtaaaatatgaagtgtatgtgtacacacattttatttttcggtatcttgggtatacgtatggttgaaaactactggagtctaaaagtattctaatttataagaagacattttggtgatgtttgaaaaatagaaatgtgctagttttgtttttatatcatgtcctttgtacgttgtaatatgagctggcttggttcagtaaatgccatcaccatttccattgagaatttaaaactcaccagtgtttaatatgcaggcttccaaaggcttatgaaaaaaatcaagacccttaaatctagttaatttgctgctaacatgaaactctttggttcttttatttttgccagataattagacacacatctaaagcttagtcttaaatggcttaagtgtagctattgattagtgctgttgctagttcagaaagaaatgtttgtgaatggaaacaagaatattcagtccaaactgttgtaaggacagtacctgaaaaccaggaaacaggataatggaaaaagtcttttaaagatgaaatgttggagccaactttcttatagaattaattgtatgtggctatagaaagcctaatgattgttgcttatttttgagagcatattattcttttatgaccataatcttgctgtttttccatcttccaaaagatcttccttctaatatgtatatcagaatgtgggtagccagtcagacaaattcatattggttggtagctttaaaaagtttgtaatgtgaagacaggaaaggacaaaatagtttgctttggtggtagtactctggttgttaagctaggtattttgagactacttccccatcacaacaacaataaaataatcactcataatcctatcacctggagacatagccatcgttaatatgttagtgactatacaatcatgttttcttctgtatatccatgtatattctttaaaaatgaaatttatactgtacctgatctcaaagctttttagcttagtatatctgtcatgaatttgtaggatgttccattgcatcagaaaacggacagtgatttgattactttctaatgccacagatgcagattacatgtagttattgagaatcctttcgaattcagtggcttaatcatgaatgtctaaatattgttgacattaggatgatacatgtaaattaaagttacatttgtttagcatagacaagcttaacattgtagatgtttctcttcaaaaatcatcttaaacatttgcatttggaattgtgttaaatagaatgtgtgaaacactgtattagtaaacttcatcacctttctacttccttatagtttgaacttttcagtttttgtagttcccaaacagttgctcaatttagagcaaattaatttaacacctgccaaaaaaaggctgctgttggcttatcagttgtctttaaattcaaatgctcatgtgacttttatcacatcaaaaaatatttcattaatgattcacctttagctctgaaaattaccgcgtttagtaattatagtgggcttataaaaacatgcaactctttttgatagttatttgagaattttggtgaaaaatatttagctgagggcagtatagaacttataaaccaatatattgatatttttaaaacatttttacatataagtaaactgccatctttgagcataactacatttaaaaataaagctgcatatttttaaatcaagtgtttaacaagaatttatattttttattttttaaaattaaaaataatttatatttcctctgttgcatgaggattctcatctgtgcttataatggttagagattttatttgtgtggaatgaagtgaggcttgtagtcatggttctagtgtttcagtttgccaagtctgtttactgcagtgaaattcatcaaatgtttcagtgtggttttctgtagcctatcatttactggctatttttttatgtacacctttaggattttctgcctactctatccagttgtccaaatgatatcctacattttacaaatgccctttcagtttctattttctttttccattaaattgccctcatgtcctaatgtgcagtttgtaagtgtgtgtgtgtgtgtctgtgtgtgtgtgaatttgattttcaagagtgctagacttccaatttgagagattaaataatttaattcaggcaaacatttttcattggaatttcacagttcattgtaatgaaaatgttaatcctggatgacctttgacatacagtaatgaatcttggatattaatgaatttgttagtagcatcttgatgtgtgttttaatgagttattttcaaagttgtgcattaaaccaaagttggcatactggaagtgtttatatcaagttccatttggctactgatggacaaaaaatagaaatgccttcctatggagagtatttttcctttaaaaaattaaaaaggttaattattttgactattcggttttaaactttttattcaacaaataccaagtccctgctgtatatatgggtttggaatacattagtgatcaaaacacaccctctatccctgcccttgaagagtttacactccagtagaggaaacagaatttacattaacaattataaattgtgatacatgctgtggaaagtgaggtgcatgtgataatggttatcaaacattatgctccccaaaatttccatcaccttgcagttgaatgaggcctatgtaactagtttattctaatgtaatacagaaagtagtgtgacactccactttctgtaaaggcaatgaaaaaaatttaccatccagtttcttcccctactgctgtgattaaggattttgcatgttctagatggtgcagctttgtcagcctgggtcttgagtgatactggagcagaactccctcaaattgttccttctgccacgctaaacttgttagatattagcataaataagaaataaaccatt

SEQ ID NO: 174 - DNA, 169 bp, Homo sapiens
ttttaagggaggagagttattctgatatcctttgtattgatattgctcttatttattattgagctggatttaagtattaatcatttaaggtcaaatttctaatgtatatatgttcttaaatggctacgacccagttaccatagcaatttagtgaaataactataatgga

SEQ ID NO: 175 - DNA, 719 bp, Homo sapiens
ccaagatgtttttagtaggtgaatggataaatcaactataatacatctcaacagtggaatgttatttagctctaaaagaaaatgagctgtcatccaatgaaaagacatggaagaaacttaaatatttatcactaagtggaagatgttaatctgaaaagactacatgccctatgattccaacaatttaacattctggaaaaagcaaaactatggagacaataaaaaattagtggtttctaggtgttaggggagagagaggaatttacagctgaggcacagagaatttttaagatagtgaaatgattctgtatgatactataatgttggatacatgtcattatatatttatccagacctataaaatgtacatgaccaagactgaaccctgatgtaaactatggatttttggtaatgataggtaaatgtaggttcaataataataacatatatactactttgatgggggatattgataattgttgaggctatgcatgtgtcagggctacaaggcatatgagaactctcccttccatccaactttgttgtgaacttaaagtctgctaaaaaagcaagcagataaattgccattcaacatgacagcctctaacaacatctgacttttagatttaaactaaaaagtaaactataaagttcttttagacaatcttgtcatggaaagtgttaaactgaaaacactcttttattaagctatgtatgca

SEQ ID NO: 176 - DNA, 719 bp, Homo sapiens
ccaagatgtttttagtaggtgaatggataaatcaactataatacatctcaacagtggaatgttatttagctctaaaagaaaatgagctgtcatccaatgaaaagacatggaagaaacttaaatatttatcactaagtggaggatgttaatctgaaaagactacatgccctatgattccaacaatttaacattctggaaaaagcaaaactatggagacaataaaaaattagtggtttctaggtgttaggggagagagaggaatttacagctgaggcacagagaatttttaagatagtgaaatgattctgtatgatactataatgttggatacatgtcattatatatttatccagacctataaaatgtacatgaccaagactgaaccctgatgtaaactatggatttttggtaatgataggtaaatgtaggttcaataataataacatatatactactttgatgggggatattgataattgttgaggctatgcatgtgtcagggctacaaggcatatgagaactctcccttccatccaactttgttgtgaacttaaagtctgctaaaaaagcaagcagataaattgccattcaacatgacagcctctaacaacatctgacttttagatttaaactaaaaagtaaactataaagttcttttagacaatcttgtcatggaaagtgttaaactgaaaacactcttttattaagctatgtatgca

SEQ ID NO: 177 - DNA, 1009 bp, Homo sapiens
agaaagtccaacatatattcaaaataggtaccaagaaagcataacattgtaagaattcactgcagtggatcatctgaagggtctaaggtgagaaatgaatatgtagtgtagaagttgaagaggcatccacaggaatgatctctaatgaactggatctgcctccaagatagagatcaaaattggtttaaaacaaatacaagccaggtgcagtggatcacgcctgtaattccagcactttgggaggccaaggcaggagaatcacttgaggcgaggagttggagcctagcctgggcaatatagtacgaccctgtctttactaaaaatgcaaaaattaaccacgtatggtggctcacacctgtagtcctggctactgaggaggctgatgcaggagaatcatttgaacccaggaggtcaaggctgcagtgagctatgattgcaccactgcaatccagcctggacaacacagtgagaccctgcctcaaaaaaattatattctgattttctgagtccatgaacacattgtccaaatggatttttctagctcctccaagttacagatagttccacgcacacacagaactcaccactctcaaatattttccccactagtatactattaaatttttcaaacatgcaaaagatgaaagaattgctcagtgaacaccatgtacccaccacctagattctacaattaacattttaccctactttctttatcacatatatgtacctatccatctatccattcttccatgaatccatcaattcatctaattttttatatatttcaagttaagttgcagatatgtagcttatgtttcaccttaaatgtttctgcctggctattattaactggagtgcaatatgtttttggttcttctttatggtaaaatctatgttcagtgaaatgcacaagacttaggtatgccattaataggttttgacgaatagacaaaccttgtgtctgaaactgtaataaaaaaatcaaacactaccttgctttcaaaaa

SEQ ID NO: 178 - DNA, 537 bp, Homo sapiens
ctgtgaggtgaggcaggtgtctagattccctactcagcttacattaagtccaaaatgtggggacgctctttattactgcctggtggggatggaagtccattgacactgctgggagaaggaggttcatgctggccagttgggatgaaagtcttagctccccacttggtcttccctgacaccactgcagtggggtgttggggtgcccctttacagccttttgagtgtgggattctaggatccccacttgaccttccctggtgtgggcagaggttttttctttggtgtctgttgggagtagagcagctgtcatctaaaagttttctgtcttgctgggacgtcctgttctggtcctttagctagagagagcattcttttgttagtactttttttgtctgtgtctgttggcatttccatgttgctggctttttcaactccaactctgggatatatgttgtaaaaagaaaacccaggaaactcaccacagtgttggtttcttggattccaaagtgttggtctatatgccttccctcaaacttt

SEQ ID NO: 179 - DNA, 510 bp, Homo sapiens
ccctactcagcttacattaagtccaaaatgtggggacgctctttattactgcctggtggggatggaagtccattgacactgctgggagaaggaggttcatgctggccagttgggatgaaagtcttagctccccacttggtcttccctgacaccactgcagtggggtgttggggtgcccctttacagccttttgagtgtgggattctaggatccccacttgaccttccctggtgtgggcagaggttttttctttggtgtctgttgggagtagagcagctgtcatctaaaagttttctgtcttgctgggacgtcctgttctggtcctttagctagagagagcattcttttgttagtactttttttgtctgtgtctgttggcatttccatgttgctggctttttcaactccaactctgggatatatgttgtaaaaagaaaacccaggaaactcaccacagtgttggtttcttggattccaaagtgttggtctatatgccttccctcaaacttt

SEQ ID NO: 180 - DNA, 3785 bp, Homo sapiens
aaaaaaaattaaactgtaaactgagtgcacacatcttaaccctaaatacatacacacatacacacaaccagccacaaaatagtgttatttccttaaatgccaaacactgtctagttctagaagtgaaaaggaccttcttgtcttttcagaagtgtgtgttttgagtatgtaatgagattacctttctgtggctttggagaattaatttcagcgctttattgtcagatcttctctgtaagaaatgtgatagggatttcccattcaatctggaactaagaattcagattgacacttgagctttgtacctcagatagcgtttttcctcatctcctgttatatatcaagcagctgagattggtttttaaaaaagtgaagattgaattgtcttcacacatttattgtgaacttgcagaaaatggaaaggattatgctttaaagacagttggcttggctggatagaaaagatccctctgtcctgtttccctgtcctccttcccacatcgatttaaaaaattagatgcaaatgcaaaatccttaaattatagatttatgataaatttaaattctggtagaatcaaggttttataacatttaaagtgtctgacactaagtgtatataatcttttaagaaacgtcttcttaacagcgcatggtattctgtgactgttcgtgtaccatgaatattcttattgggttctagagttagttactgactcttgaagatgggcatctaatggtcctcctgtggaagtggagagcagctctccactgtttgataacatttaaagccaagggtgaaccactcaagaaacatttggtggttataatatttttttgttgttgttaagtaccatcaataaaactgaaaaatctcttaagtacctgactcctgcagtgatacaactgcagtgataaaacttttagctttttacatcaggggtattaggtattttctcacagaaatagccttttgaggtgaaattcacataacatacaattaaccattgtaaaatgaacaattcagtggcgtgtaagagtatgtttacaatgttgagcaaccatcacctctgtctagttgcaaaatgttttcatcactccaaaagaaactcctttattcatcatagcccaaagttggaagtattttcttgattgggctcttgattacatggatgcatctgagtcattgaattgaagcctaagatgtgcttaatttcactgtgtgtaagtttcacctcagttaacaagagagaacagaacaaaccaaaaatcttaattcttttgaaaaaaagactttctggctgctttattaaagaagccaggggaacaaggttaaaaggaaatcagttagcagtgaccaaggcaagagatgatggtggcttggctgaagatggtgacagtggaggtggtaaggtgatcagattctggatatattttgaaggttgagctaatttggtcagctgatgggcataatggatgtgagggaaagaaagttggaaaggatgatgtgaagatttttaatgggatggaataggtgtttaatgaacagccatttaacaacatcagggtaatttcatcttgtgtatcattctctacaacagggttatactctaggacagtagagtactgcgggtactctaggtggtacttggataaacatcattaaaactgcctcactttgatgactaaacaactgctttcctgcagtcccacttaatgagatgtactactagaactggtcattcggaagatcaggcatttggttttaaatatgcatatacctgtttgacatctgagatgggctatcaaataggcagttgtgatgaaggagacgggagttcagaggtctgactgagacctataaaatctggagcgtcagcacagatagtaaagccctgagattgaatgactttcccacaggagtgagtgtagacaggaaggcctgggaactgagcctggatgcactggggctttagaggtcagggagaggagaagaatccagcaaaggggagtgcgaaggtctggccagtggggtaaggtgaaaaccagatcagtgtggtttcctgtttctagtagaaaaagctcaaccaaacattcagattgtcctttacgtattaacttcattctagctaatttgttgtttaattagtcccgtattaattggtaaagccgtaaagattttgatggcttaactcttctattttttaccctccactgataaatcaaatgcatgtcgttttatgtgaaaactgaaatagaaaaatgcagtctaattttagtgtgaactatgcattgaaatagccatgtcctccttaggtaacagtgttcaaaattttaagataaaatcgtattgcttcattaaatttcaactggttaacgtcaaatcagtgttaaaactataccgtaatagccctggggtagacacattaatggcgccccccgcagtgtccatattccaatccccagacctataaatatgtaaccgcacattgtaaaggagactttacagaggtgattaaggatttggggatgaagcagttatccaggattatctgggtaaggtgggcctgatgtagccacaaggggcctcctaagtgaaagagagaggtagggtggtcagaactagagagaggtttgaaggtgttacaccactagctttgaaggcagaggaaggggccacaagccaatgaatatatgtggtccctagaagctggaaaaggccagggagtggattcttctctagagtctccagaagaaatgtggcccttctgacaccttcatttagtccacagaactataatttatcttagtttaagccactggtaagtgtaattgtaattgtaatttgttacatctgctatagtgaaactaatactgaaatttagaaaagatgggtaacttattatgtggtgaagtttaaaaaagataagtaactcgttgaagatcacataattagaaaagaaagcagtagagcttggccttgaactcaaccagtgtgactccagagcttgtagaacagaataaccacctccaaggccagctgaatctgaccacagtctggtggaattctagtacatctcgttaagaagtgggattgccggaagggagttggttattcatgaaagtgatgatgtttatccaatgtaccacctagagtacccttagtactctactgtcctagagtataaccctgttgtaaagaatgatacacaagacaaacttaccctgatgttgttaaatatatgttagatgaccagttgctttgatttctttgctcaataaacattggattacagctggtttgctgtgtggcatgcctacatggagggaacacactgagccaatgatttcatcatctgggtccctttggtttatatcagtttccaacatgacttgtttgtggggcttgtgggaggggcacatacatcggccccaggattctaacatctcctggtctctgaggttataattttcacttaacattgtcgagttggcattttggttttagtccaatggttcagttctttgaaactgactccagagatggctctgttcattaatagattgttttgttgaccctgtgaggattagtctgtggatcttggaaattcggcaggtgactacaattctagaaggcctcttgtgagatataaggtgttttccttaagtgacatggccctgcgttgcaaagctgagaagtaatatgaaggagcgttttgtaagtttgaatctctataatcaaaaaccagactaatgacacattcgcttttagaacttaaaaaaaaaaa

SEQ ID NO: 181 - DNA, 2695 bp, Homo sapiens
aaaaaacaaaaaccaccaaaaaaaaactgccaaagtataggttatagaagagcagacttacttggtgtttgcaagaaagacaaagagatttagagtttccatcaagtttgttgtgagttactaggaggtagtgccagagaagcaacatggcattaggctgcatgggtagaagtatagtactgagaacacgggagagcatcggttttgttgtacttgggactaaacattctgagggtcctggacgttttatgagaggctttggtaaactgaagagtgatgtaggtacagatgcacagatgtagaacagtggacagaaatggaaatatttaacctggagaggaatttaggttggaggaagggaacacagttgtttttagttttttgcaggtatggaatttgtactgcaattaaggaacagggaaaagtcctctctgtccttcgcacggctgtttattaggtatttcagttagagtgtataggtctcaggaagccatgaggatcttctctgggtggtgacaggactcacatcatctccgttatggccctgcaacaaaacttcacaattctgtatgtttcctgcctagtaagctcccacctgttctgtggtaattaatctcatactcaaccatggagttgtttctagatcttggtgtgttgtcctccctcccctttgcctaaaatcaataacctgagcacacctaaaggtgtcttcaggcctcgatgtgccctgtgaattgtgcggggttctagggtctctgtacgtaaggagatggtctgcatttgcctggcccctcttgcaggaagagcagcagcggttgcctcgcctccggtcctcagcttggtccttagcagggtgagcagggccagagtcatgggcatgtgacctgtgcactccctcatggccccacgcttgctttcacattttcctactggcatcaatactttttttttcttttctttttctttttttttttttttgagacagagtcttgctctgttgcccatgctggagtgcagtggcgtgatctcggctcactgcaagctccacctcccgggttcacgccattctcctgcctcagcctcccgagtagctgggactacaggcatctgccaccacgcccggctaattttttttttttttttaatagtagtgacggggtttcaccgtgttagccaggatggtctcaatctcctgagctcatgattcacctgcctcagcctccgaaagtgctgggattacaggcgtgagcccctgcgccagcccagcatcaatactttttttaaaaagtgccctgtattttcctcatgccctggagataatggagccgtcttttactcactgcccacttctcatctctgtctgctcctgcttcctcttgttggcttcctgtgcctccctccaaccttctcctacccccctgcagtgttttaaactctcttttcttcttaatttctgttcgcctcaaccaaccctaaagtgctcttgtactcacagttaggcttttataattgcttgatcagtttatcagtcaatttcagtattttgttgagctttgacaaagatttttattctaattctatggagcccatgtaataattgttttttcagcttctgcttgtgacttctctacttcaaaaaatgtacgtgcttgtttctgccagttacatcccatgtttcattggatgtgtgtactgtgttcacatcgagttggccccaccgctgagtgggttattgatgatctcaagagtccagtagaaatgaagggtagaaacttagccacatcctggtttgtgttttgcctaacagaggggtttcactttcctctttggtaagatgaatatgcttgataatagaatagcattaaggttggcttttttctccctcaaatgattaaactgtagtttcatatgtaaatgccagtaaattagaatcattctagtagggaagataaagtaaataagtaaaaatatagtatgttagtaggaaatcgtgctagagagagagagctcaagcaggacaggaggggcctagagattgcttgggatttgatgaagagacaggactgttttagagaggctgctcacggcagtgcctctgagcaggtagcactggagccgatcctctgctgcgatgaggtggcaagccaagaacatcatgagggagggaagggcagtcccagaagagagagcacagtgcaggtgccaggtggggaccacgggacactggaactgccttggtgtgtttatttccaaatagtgtctggcattacactgagatgaggagacttttttgtttttcattttttgtttttttttcccggggtaggggtgcatattggatttcttcaggagattcagcctcttgaaaaatatgaaatatagacaagtatatatacataaagatatatttgagtattttaaactttatatagccaagtatcttaaactctgcacacttgaatttttaatcctcgtgtatatccattatgattatttctattagttccagtttgaggttggtgatgatattgtcatagaagctttgtcaggcttcacattgtagcagctggtcttgaaggtggggcatatccttgttcaatgtgactactttagttgcctgtccaatatgaagtagaaaagcagatttctggattacagtatttgtcaacatagaatttgccgatttaaaaaaaaa

SEQ ID NO: 182 - DNA, 493 bp, Homo sapiens
gtgtgcacatatgtgggtccagtgttctttacaaaggccccctgtgtggcatctgtcgtacttcttatttgttcagcatatcccttggcttgtgatggaagatacacaatctgtacctttgtctgaaggagataccagctcctgagtggccttttacatcatccttaggtggggatagttaacttaaaaaaaaaaaaaaccggcgagggagaaaaggccgtcttagccatagttggcagcccctagccctttagcctaaggaagtctacagagactacggcacttgggtgcagacttttaatgaacccatcttttgttgtttttgtccattgcactgtctgtgtgtaacacacacgtcccggttctcgcccctgatcctgatggttccaaggagcgtggatggatactttcaagaccaaccagactactacgtggcttagtgtagatatggcgataaaacacttgtgctttggaaaacgtaaaaatcccgaac

SEQ ID NO: 183 - DNA, 6731 bp, Homo sapiens
tgactcgggccagaacgcctggctgtcgtaccagctgctcaaggccacggagcccgggctattcggcgtgtgggcgcacaatggcgaggtgcgcaccgccaggctgctgagcgagcgcgacgcggccaagcacaggctggtggtgctggtcaaggacaatggcgagcctccgcgctcggccaccgccacgctgcacgtgctcctggtggacggcttctcccagccctacctgcctctcccggaggcggccccggcccaggcccaggccgactcgctcactgtctacctggtggtggcgttggcctcagtgtcgtcgctcttcctcttctcggtgctcctgttcgtggcggtgcggctgtgcaggaggagcagggcggccccggtcggtcgctgctcggtgcctgagggcccctttccaggacatctggtggacgtgagtggcaccgggaccctgtcccagagctaccactatgaggtgtgtgtgactggaggctccaggtcaaataagttcaaatttctgaaaccaattatccccaacttcctaccccagagcacaggtagtgaagtcgaagaaaatcccccatttcagaataatttgggtttctgataaagaatgaaaaataaaacctgtgtttatgaatacatttataattaggaacttatcgtgaggtgcctgtaaagtagtatttttgatcacttcaaatacatactcttcaagtcaagaaataaatttctttacatagaaaaggatacagatttagtaccaagaacacttcacaaagcaggaaatgtgcatgtgtaatggtttatgtcaaacaattatgcttaatataaagtctattaagtggtaagtcttgtttgagatattttaaattgctttccattgttttcaatatttactgtgacttttgttttctgagttgattagaatgctgttcgagtatacctaccctagtttcagaagcatagattgtagtgtacctttttaaactttatttttttaaaaaaagttgttttatgaatcatacactattttcacacttttaatctcagaagaaacatatgtgacatggtattttagtaatgaccaaatagacggtcttagagattcagtaagttcactaaggtccactaactaataagtgacaaaactgagcatccatcctagatctgcctgactctaagtcagtgactttgctcccattccatactgtttttgtcattggatatcacctggcaagtttctgcctaactaaagagaagaaaagtttttatcgtattcatactactgttcaatctttatttagaaataaactttatctatgatttcattttcttataaaccagtaatcttgcttttctgggtaaattttcagctattattactaatgctctgatctgcccaaatcttaagtaaaaaacaaaattgaaagagcaacctgtgccttctcattgtctcctgaacatataactatcatttcacagaaaagattaatggtcctgattaggaatagtacataattttgatggcattattagttaattattttctttacattgtagtatatttccagagtcacccatgcttacatttgtaatatattttcctgatttgagagtttgtttttagcagtttttcttacctatactgcactgctgaatcaggaaaatttaagaaaaagaatagatttaaatgtgtaatatcaaagagaaatatagatgatcattacatttttagaaattttggggagttaaggagaagcattgtttgttaaaaatatataaccgattcttatatttaaaataggtaatttttgcatagttgtgttctaaatatattataaactagtgccagtaactctaataaagctagtattactgcatatcactggtgggatagaatctaaggacaaaaactcacagtagtaaaatctaaaattgctttcatggtctcagggtaaaattatccaatttctctgacaaataaatggctcaaaaaataagaggagtgaagtttacacaaggaaaaatcttaagaggtctaccactcaaatacaatgtgtggatcttttttggatcttgattgaaacaacagcaatgactttgaaaaacttggaagaatttgaatatagatgggtattaaataatgttaacttgatttttaggtatgataatggcattgtacttaagcatatttttagagtcatttaaagtcatgatgcttttaaagaaatgtataatgacgtatttgtgggagaaaattcagtttgtctgggatgtgaaaatgttgaagggatagagtcaagaattatggcaaaacattgataatagttgaagctagtactgagtccttggaggatcattatactcctctcttttatgagatttgaaaaatttcaaaataatgtcttttaattgatgctgttagaagtggaggtaataaaaaaggacatccttcccagaaacaaaatcaccactgctgttacagatattgtctctatttagacaactctccagcctttccttgttcatttcctttcattattggacataacctctctacctgagatagtcatgctcctgtattcttctaccatttgaatttcgaggtgtttatctagttatagtaatggatttatgctagacttatgatggatttatgccatcaagactcagttacttgatggcatcaaattgctttatacttggtatataccttatttttaaggttaatatctatttgcattagattcctcatgtttaaggtggggaattcacaacagccctatgtggtaggtactgttcttatcctcactttacagaggagcaaactaaagcagagagattaaataatttgttcgaggttcacagctactaattattcctatggttcatggaaataaaactataaagatctaaatgttgtccatgataactacaattatatttgaaattctttttgccaagctagactattacctaaatatttcctttttgcccaaaactcagttatcattgttgaaagactaatgtgatttctcctttgggcagttgtctgctcactaaagtccggcgatattaacggtggtgttgtaaccttacatagtctcggggtgcatacaggcagagttgggaatattacatccattatcattccacaaaatgtaagatcctgtgaggacgcgtggtggcgctgcaggataagaaggcacaaaccagaaccgcagctgcagctccattaaccggcaaaaagcagcagaacctggaagtccacggggagcttggatgccaaagggaggacggctgggtcctctggagaggactactcactggcatatttctgaggtatctgtagaataaccacagcctcagatactggggactttacagtcccacagaaccgtcctcccaggaagctgaatccagcaagaacaatggaggccagcgggaagctcatttgcagacaaaggcaagtccttttttcctttctcctttgggcttatctctggcgggcgcggcggaacctagaagctattctgtggtggaggaaactgagggcagctcctttgtcaccaatttagcaaaggacctgggtctggagcagagggaattctccaggcggggggttagggttgtttccagagggaacaaactacatttgcagctcaatcaggagaccgcggatttgttgctaaatgagaaattggaccgtgaggatctgtgcggtcacacagagccctgtgtgctacgtttccaagtgttgctagagagtcccttcgagttttttcaagctgagctgcaagtaatagacataaacgaccactctccagtatttctggacaaacaaatgttggtgaaagtatcagagagcagtcctcctgggactacgtttcctctgaagaatgccgaagacttagatgtaggccaaaacaatattgagaactatataatcagccccaactcctattttcgggtcctcacccgcaaacgcagtgatggcaggaaatacccagagctggtgctggacaaagcgctggaccgagaggaagaagctgagctcaggttaacactcacagcactggatggtggctctccgcccagatctggcactgctcaggtctacatcgaagtcctggatgtcaacgataatgcccctgaatttgagcagcctttctatagagtgcagatctctgaggacagtccggtaggcttcctggttgtgaaggtctctgccacggatgtagacacaggagtcaacggagagatttcctattcacttttccaagcttcagaagagattggcaaaacctttaagatcaatcccttgacaggagaaattgaactaaaaaaacaactcgatttcgaaaaacttcagtcctatgaagtcaatattgaggcaagagatgctggaaccttttctggaaaatgcaccgttctgattcaagtgatagatgtgaacgaccatgccccagaagttaccatgtctgcatttaccagcccaatacctgagaacgcgcctgaaactgtggttgcacttttcagtgtttcagatcttgattcaggagaaaatgggaaaattagttgctccattcaggaggatctacccttcctcctgaaatccgcggaaaacttttacaccctactaacggagagaccactagacagagaaagcagagcggaatacaacatcactatcactgtcactgacttggggacccctatgctgataacacagctcaatatgaccgtgctgatcgccgatgtcaatgacaacgctcccgccttcacccaaacctcctacaccctgttcgtccgcgagaacaacagccccgccctgcacatccgcagcgtcagcgctacagacagagactcaggcaccaacgcccaggtcacctactcgctgctgccgccccaggacccgcacctgcccctcacatccctggtctccatcaacgcggacaacggccacctgttcgccctcaggtctctggactacgaggccctgcaggggttccagttccgcgtgggcgcttcagaccacggctccccggcgctgagcagcgaggcgctggtgcgcgtggtggtgctggacgccaacgacaactcgcccttcgtgctgtacccgctgcagaacggctccgcgccctgcaccgagctggtgccccgggcggccgagccgggctacctggtgaccaaggtggtggcggtggacggcgactcgggccagaacgcctggctgtcgtaccagctgctcaaggccacggagctcggtctgttcggcgtgtgggcgcacaatggcgaggtgcgcaccgccaggctgctgagcgagcgcgacgcggccaagcacaggctggtggtgctggtcaaggacaatggcgagcctccgcgctcggccaccgccacgctgcacgtgctcctggtggacggcttctcccagccctacctgcctctcccggaggcggccccgacccaggcccaggccgacttgctcaccgtctacctggtggtggcgttggcctcggtgtcttcgctcttcctcttttcggtgctcctgttcgtggcggtgcggctgtgtaggaggagcagggcggcctcggtgggtcgctgcttggtgcccgagggcccccttccagggcatcttgtggacatgagcggcaccaggaccctatcccagagctaccagtatgaggtgtgtctggcaggaggctcagggaccaatgagttcaagttcctgaagccgattatccccaacttccctccccagtgccctgggaaagaaatacaaggaaattctaccttccccaataactttgggttcaatatttagtgaccatagttgacttttacattccataggtattttattttgtggcatttccatgccaatgtttatttcccccaatttgtgtgtatgtaatattgtacggatttactcttgatttttctcatgttctttctccctttgttttaaagtgaacatttacctttattcctggttcttaaaaggtgacaattcattctttaacccagatggtcttaatttgtaattaatttgcctccctaaagagcaataccaaatcacatttttttcatgcccctatctttagctgaacttcacccactattatgcttatggtaaaattaaatagagcaatttggaagtgattccaattttccagcatttcttcatttgattctctttttttagtcttaaaataatgactcctattcagacatatcatttttcttttttgtaaatccagtgcgtttttagttaacctttaaatatgctttttgctttcaaaaataaaccagaaaacctatatcctatgatacaactctaagtgttatcacttgattcgaaagggtcagaagaccagttttttagtatcctttcctcattcatcctggagaggattgtgcaggcacattaatattgtgaccaatcacagaatctgggaatatgaagctataattttttaattaatgtcacaaagctctagtgcaatctagttgaatgcagatgcctgtgcccaaataataattcatatagcataaattggagttgtgtgttaatgtgtaaaaatttttgcctgtactatcatataatttaatgtatatacaccagaaactatttttcaaactttttttactgcaaccaatagttaagattatattttacatattttgaaacacacaagcttaatagaaataaatgcttgtgaacaatg

SEQ ID NO: 184 - DNA, 1035 bp, Homo sapiens
cctgtgccttctcattgtctcctgaacatataactatcatttcacagaaaagattaatggtcctgattaggaatagtacataattttgatggcattattagttaattattttctttacattgtagtatatttccagagtcacccatgcttacatttgtaatatattttcctgatttgagagtttgtttttagcagtttttcttacctatactgcactgctgaatcaggaaaatttaagaaaaagaatagatttaaatgtgtaatatcaaagagaaatatagatgatcattaaatttttagaaattttggggagttaaggagaagcattgtttgttaaaaatatataaccgattcttatatttaaaataggtaatttttgcatagttgtgttctaaatatattataaactagtgccagtaactctaataaagctagtattactgcatatcactggtgggatagaatctaaggacaaaaactcacagtagtaaaatctaaaattgctttcatggtctcagggtaaaattatccaatttctctgacaaataaatggctcaaaaaataagaggagtgaagtttacacaaggaaaaatcttaagaggtctaccactcaaatacaatgtgtggatcttttttggatcttgattgaaacaacagcaatgactttgaaaaacttggaagaatttgaatatagatgggtattaaataatgttaacttgatttttaggtatgataatggcattgtacttaagcatatttttagagtcatttaaagtcatgatgcttttaaagaaatgtataatgacgtatttgtgggagaaaattcagtttgtctgggatgtgaaaatgttgaagggatagagtcaagaattatggcaaacttgataatagttgaagctagtactgagtccttggaggatcattatactcctctcttttatgagatttgaaaaatttcaaataatgtcttttaattgatgctgttagaagtggaggtaataaaaaaggacatccttcccagaaacaaatcaccac

SEQ ID NO: 185 - DNA, 1039 bp, Homo sapiens
cctatgccttctcattgtctcctgaacatataactatcatttcacagaaaagattaatggtcctgattaggaatagtacataattttgatggcattattagttaattattttctttacattgtagtatatttccagagtcacccatgcttacatttgtaatatattttcctgatttgagagtttgtttttagcagtttttcttacctatactgcactgctgaatcaggaaaatttaagaaaaagaatagatttaaatgtgtaatatcaaagagaaatatagatgatcattaaatttttagaaattttggggagttaaggagaagcattgtttgttaaaaatatataaccgattcttatatttaaaataggtaatttttgcatagttgtgttctaaatatattataaactagtgccagtaactctaataaagctagtattactgcatatcactggtgggatagaatctaaggacaaaaactcacagtagtaaaatctaaaattgctttcatggtctcagggtaaaattatccaatttctctgacaaataaatggctcaaaaaataagaggagtgaagtttacacaaggaaaaatcttaagaggtctaccactcaaatacaatgtgtggatcttttttggatcttgattgaaacaacagcaatgactttgaaaaacttggaagaatttgaatatagatgggtattaaataatgttaacttgatttttaggtatgataatggcattgtacttaagcatatttttagagtcatttaaagtcatgatgcttttaaagaaatgtataatgacgtatttgtgggagaaaattcagtttgtctgggatgtgaaaatgttgaagggatagagtcaagaattatggcaaaacattgataatagttgaagctagtactgagtccttggaggatcattatactcctctcttttatgagatttgaaaaatttcaaaataatgtcttttaattgatgctgttagaagtggaggtaataaaaaaggacatccttcccagaaacaaaatcaccac

SEQ ID NO: 186 - DNA, 300 bp, Homo sapiens
ctacagtctatgttgtgggagaaaaatgtagaataacaaaatgagtaaaagtatagaggcaaaacaagcatgtgtatgagagagagagagaaagcatggaaaagaggaaattcatggggatgagcaaaatgactacttccagtgccacagactagactcagttgcttctcttatgttattttttgagacaaggtcctgttctgtcacccaggctggagtgcagtggtgtgatctccactcactgtgatctccactcactgcaacctccacctcctgggctcaagtgatcctcccacctca

SEQ ID NO: 187 - DNA, 286 bp, Homo sapiens
tatcgtgaggtgcctgtaaagtagtatttttgatcacttcaaatacatactcttcaagtcaagaaataaatttctttacatagaaaaggatacagatttagtaccaagaacacttcacaaagcaggaaatgtgcatgtgtaatggtttatgtcaaacaattatgcttaatataaagtctattaagtggtaagtcttgtttgagatattttaaattgctttccattgttttcaatatttactgtgacttttgttttctgagttgattagaatgctgttcgagtatac

SEQ ID NO: 188 - DNA, 3485 bp, Homo sapiens
aaaaagcagcagaacctggaagtccacggggagcttggatgccaaagggaggacggctgggtcctctggagaggactactcactggcatatttctgaggtatctgtagaataaccacagcctcagatactggggactttacagtcccacagaaccgtcctcccaggaagctgaatccagcaagaacaatggaggccagcgggaagctcatttgcagacaaaggcaagtccttttttcctttctccttttgggcttatctctggcgggcgcggcggaacctagaagctattctgtggtggaggaaactgagggcagctcctttgtcaccaatttagcaaaggacctgggtctggagcagagggaattctccaggcggggggttagggttgtttccagagggaacaaactacatttgcagctcaatcaggagaccgcggatttgttgctaaatgagaaattggaccgtgaggatctgtgcggtcacacagagccctgtgtgctacgtttccaagtgttgctagagagtcccttcgagttttttcaagctgagctgcaagtaatagacataaacgaccactctccagtatttctggacaaacaaatgttggtgaaagtatcagagagcagtcctcctgggactacgtttcctctgaagaatgccgaagacttagatgtaggccaaaacaatattgagaactatataatcagccccaactcctattttcgggtcctcacccgcaaacgcagtgatggcaggaaatacccagagctggtgctggacaaagcgctggaccgagaggaagaagctgagctcaggttaacactcacagcactggatggtggctctccgcccagatctggcactgctcaggtctacatcgaagtcctggatgtcaacgataatgcccctgaatttgagcagcctttctatagagtgcagatctctgaggacagtccggtaggcttcctggttgtgaaggtctctgccacggatgtagacacaggagtcaacggagagatttcctattcacttttccaagcttcagaagagattggcaaaacctttaagatcaatcccttgacaggagaaattgaactaaaaaaacaactcgatttcgaaaaacttcagtcctatgaagtcaatattgaggcaagagatgctggaaccttttctggaaaatgcaccgttctgattcaagtgatagatgtgaacgaccatgccccagaagttaccatgtctgcatttaccagcccaatacctgagaacgcgcctgaaactgtggttgcacttttcagtgtttcagatcttgattcaggagaaaatgggaaaattagttgctccattcaggaggatctacccttcctcctgaaatccgcggaaaacttttacaccctactaacggagagaccactagacagagaaagcagagcggaatacaacatcactatcactgtcactgacttggggacccctatgctgataacacagctcaatatgaccgtgctgatcgccgatgtcaatgacaacgctcccgccttcacccaaacctcctacaccctgttcgtccgcgagaacaacagccccgccctgcacatccgcagcgtcagcgctacagacagagactcaggcaccaacgcccaggtcacctactcgctgctgccgccccaggacccgcacctgcccctcacatccctggtctccatcaacgcggacaacggccacctgttcgccctcaggtctctggactacgaggccctgcaggggttccagttccgcgtgggcgcttcagaccacggctccccggcgctgagcagcgaggcgctggtgcgcgtggtggtgctggacgccaacgacaactcgcccttcgtgctgtacccgctgcagaacggctccgcgccctgcaccgagctggtgccccgggcggccgagccgggctacctggtgaccaaggtggtggcggtggacggcgactcgggccagaacgcctggctgtcgtaccagctgctcaaggccacggagctcggtctgttcggcgtgtgggcgcacaatggcgaggtgcgcaccgccaggctgctgagcgagcgcgacgcggccaagcacaggctggtggtgctggtcaaggacaatggcgagcctccgcgctcggccaccgccacgctgcacgtgctcctggtggacggcttctcccagccctacctgcctctcccggaggcggccccgacccaggcccaggccgacttgctcaccgtctacctggtggtggcgttggcctcggtgtcttcgctcttcctcttttcggtgctcctgttcgtggcggtgcggctgtgtaggaggagcagggcggcctcggtgggtcgctgcttggtgcccgagggcccccttccagggcatcttgtggacatgagcggcaccaggaccctatcccagagctaccagtatgaggtgtgtctggcaggaggctcagggaccaatgagttcaagttcctgaagccgattatccccaacttccctccccagtgccctgggaaagaaatacaaggaaattctaccttccccaataactttgggttcaatattcagtgaccatagttgacttttacattccataggtattttattttgtggcatttccatgccaatgtttatttcccccaatttgtgtgtatgtaatattgtacggatttactcttgatttttctcatgttctttctccctttgttttaaagtgaacatttacctttattcctggttcttaaaaggtgacaattcattctttaacccagatggtcttaatttgtaattaatttgcctccctaaagagcaataccaaatcacatttttttcatgcccctatctttagctgaacttcacccactattatgcttatggtaaaattaaatagagcaatttggaagtgattccaattttccagcatttcttcatttgattctctttttttagtcttaaaataatgactcctattcagacatatcatttttcttttttgtaaatccagtgcgtttttagttaacctttaaatatgctttttgctttcaaaaataaaccagaaaacctatatcctatgatacaactctaagtgttatcacttgattcgaaagggtcagaagaccagttttttagtatcctttcctcattcatcctggagaggattgtgcaggcacattaatattgtgaccaatcacagaatctgggaatatgaagctataattttttaattaatgtcacaaagctctagtgcaatctagttgaatgcagatgcctgtgcccaaataataattcatatagcataaattggagttgtgtgttaatgtgtaaaaatttttgcctgtactatcatataatttaatgtatatacaccagaaactatttttcaaactttttttactgcaaccaatagttaagattatattttacatattttgaaacacacaagcttaatagaaataaatgcttgtgaacaatg

SEQ ID NO: 189 - DNA, 286 bp, Homo sapiens; identical to SEQ ID NO: 187

SEQ ID NO: 190 - DNA, 300 bp, Homo sapiens
aacggtaccaatggtattacgatgtgtcacttggcctgtggaagagagagactgagtctcaacccgagctgtcttgcaaaacactaatggcttacgttccgtagtttcactcttatgtgtagtttttatattccatcagggtgatcccttggggactacgctccttgaaacaaggaggacagtgtaagtatgtggtaaacatttggtaaatacggttaatactagttaacctatccagaattacagtttaacatttcctgggcgtctgtctgtatgtggatggtactgtgttagttgggg

SEQ ID NO: 191 - DNA, 779 bp, Homo sapiens
ccggcttccttcactccagcccaccgcgtccgagagacttagcagggcgtcaaactggagagcggaaggatggaaccttttattctcaggtggagaggattaagctttgcggtgttagcagaaaatgatcgagctccagaaaatgatttggaggtcagattcgattttaaagtagtactaacaggccgggcgcggtgcctcacgcctgtaatcctagcactttgggaggccgaggtgggcggatcacctgaggttaggagttcgagaccagcctgaccaacatggtgaaaccccgtctctactaaaaatacaaatattagccgggcgtggtggcgggcgtttgtaatcccaattacttgggaggctgaggcaggagaatcgcttgaaccctgcaggcggaggttgcagtgagccgaaatcgcgccactgcactccagcctgggtgacaggacgagactttgtcgcgaaaaataaaataaaacggtaccaatggtattacgtatgtgtcacttggcatgtggaagagagataatgagtctcaacccgagctgtcttgcaaatcactaatggctacgttccgtagtttcactcttatgtgtagtttttatattccatcagggtgatcccttggggactacgctccttgaaacaaggaggacagtgtaagtatgtggtaaacatttggtaaatacggttaatactagttaacctatccagaattacagtttaacatttcctgggcgtctgtctgtatgtggatggtactgtgttagttgggg

SEQ ID NO: 192 - DNA, 2544 bp, Homo sapiens
ttcatttcaagttgaggatttatttctgtaggagagatggtttgatcttcttctgaaatgatgcatcccaaaatttatctctaatgcttaaaaagtgcacaatcctaaaacctccaacattcaaacaggcaaatgcctgggggcagtctgcatttcagtttctaacatctttccctcatttccccacacacccaaatgctccaatttaggccttaatttcctacatgggaaatcaggagggaattgataccacatcagggatttacattaatttgacttgctcttttcaaatttcaaattcgcctctacttctgttcaacaacaaaacctccagaaaaggatccagtagaacctctacagacttcattcgaagaacctcctttagctccaaagaaagagggtaagagactatgccccatacccctttctggagtctcttcatgaggaagtcggagcctccaggcttttgtcctaggcttgggtatttggcctttagctttgcctcttcagctctctcaggcagaataccttctttctcctgcgtgtcctggagaaaacaaatgagccaaataaaattaaagactgagaaacaacagcttctcacatctgataacaactatactatcaacttctcctggaaatccacccacttgtaaatacgctatctctactctgctgttaaagctagacctttgttaaaatccctaaagctcaagatgactattgtgagagaaaaagacaagctgcttctcacacttcacccaaggaaccagccagggacctgtgcgtattgggctaaaggtaatactaaacacaatactttaatcacagagtgggccatatcactcagcacaaatgctaagaaagacaaagagaaaaaagcagggcttctggtgatagaggatgagtagcagggttccctaggctatcctacatgtcacatgagaaattaaaaaaaaaatagtttggggctgggagcagtgactcatgcctgtaatcccagcactttgggaggctgaggcaggtgcatcacttgagctcatgaattcactacccgcctgggcaatatgttgaaaccccgtctctacaacaacaaaaaatagtttgctaaatgtttcctccttatttttttctttcttttttaaaattgctacacgacaaagcagttccttctttattcaaggtctaagccacctgttaggtctccctgtggaggcggctagctatgtggccttctccaaagatctccacctgagtaatggcacagccttgcttcaacatttccacaaatattatggtagcaagctgataaacagagaggaaaatgatactgtttttaacctcaggaaaacaaagatacagtaggctcactagtatttacccaccagttttcatcaaaaaaatcaatacctaccctggtggtgcagggactctcactactgtagtcaatctcttttttttttttttgtggtccctgctgccctttagtgactttttgaaaagatatgaagtcaacgtatgactctttttagtggaattatattcctttctcttggaaattacgcatagatataacaccaagtgtatttaatgagtacctgaacccagtactaaattttaaaagtcaaatacaaaccccaataaggggtttatttggcgttagtgtttccatcacggaatcgcaggtgcactaagtccctgccttggaagtctaggggaagagagaagtgtctttctcacgaccctgtcggcgtcttttccaagtttaattaccatgattctgtttggaactctagccctcttcaatattgctgggtcctcactgaaggtgagcaatagaccatccttagctactaaaataggtctcttgagaaagttgccgccttaaactagccattataataactacacttctcccctcccccaatactggtttttttttaaacgtctttacctcgacccctatctttgcggattgaggctgcgggccccagcccggttgctgggtcacttacctctacaaaccaataacacacatcacacccaagaccaccagccatcccctttccattcaccgtctttccaaccacccgccccacgtccatgctcggccaattatagcacagcgtccaaggtttgagcggtaggcctattggccaatcaggaagagtacagtactgagtgacaaacgacccaactaaccagcgccaaagcagcatgtcgtgttgaagctcacccagcgtgacgcaaaaagtggccaacccctgcggagcctgagaccatggcgaccaatccgcactggtgggagaccgtctcccgccccatcacggtctccccagctcgcccgcccgcaccccttccacttcacctgcttctcctcgccggtctcctccgcagggttctcttcttcttgtttctgggacatggcgggaccgggactgtggagtgtaaggggcccgggaaggcaaccggagaagggaagggggaggggaaacggggacaacctgcgctgctgcttcggctcctgtcactagggttgctcag

SEQ ID NO: 193 - DNA, 25423 bp, Homo sapiens
agaggaggacctattagagcctttgccccggcgtcggtgactcagtgttcgcgggagcgccgcacctacaccagccaacccagatcccgaggtccgacagcgcccggcccagatccccacgcctgccaggagcaagccgagagccagccggccggcgcactccgactccgagcagtctctgtccttcgacccgagccccgcgccctttccgggacccctgccccgcgggcagcgctgccaacctgccggccatggagaccccgtcccagcggcgcgccacccgcagcggggcgcaggccagctccactccgctgtcgcccacccgcatcacccggctgcaggagaaggaggacctgcaggagctcaatgatcgcttggcggtctacatcgaccgtgtgcgctcgctggaaacggagaacgcagggctgcgccttcgcatcaccgagtctgaagaggtggtcagccgcgaggtgtccggcatcaaggccgcctacgaggccgagctcggggatgcccgcaagacccttgactcagtagccaaggagcgcgcccgcctgcagctggagctgagcaaagtgcgtgaggagtttaaggagctgaaagcgcggtgagttcgcccaggtggctgcgtgcctggcggggagtggagagggcggcgggccggcgcccctggccggccgcaggaagggagtgagagggcctggaggccgataactttgccatagtctcctccctccccggaactgcccccagcgggtgactggcagtgtcaaggggaattgtcaagacaggacagagagggaagtggtggtctctgggagagggtcggggaggatataaggaatggtgggggtatcagggacaagttggggctggggccggcctgaattcggtcagattgggatttgccaactatttggagccggggggaggggcttgagcaaaacagaactagccctgccagctcgaagaactctgggcacccaggacacatcggagtggcagaaagggtcctgttagaactttgttagcgggcttggcactgtgctagctttgcccaagctggctctgaacacatgatgcccactaagacataactctcaagttggcatctgtccagcgtgttggagcgaggtcaggaaggcagggcaatcccccttttccctcccaagggcttggcggtggccccccctcagcatgaccttgtcctgggttctaagggttgggaagttctccctcactctgccactctgcgtgtctgggaccttccttgggctctgacaggcccaccaaaagagctccgggagatgagagatcggctcccccgcagctcccacagcccttggcctgcttggcccaggaatgcaagggagggagggaggcagagggcagaggctcccagctcaggaagttgtgttatgcccaggtctggccgcactcctcccttggccctctgcctagtgtcttcgagggttgggggcactgtccttccctccttggggtgagccactttcattttcccagcggggccaggcagtctttgctcgggcccatcctcttagctgctgacgttttgatctttgtcttattgaagtgctggaatacagtgacatttttgaaatccagccgttggaagattcaggccactcccactttacccacccctgccccaccctaccccaccctactcaactgcaccttcttcttttctaaaaaagcctttgggagcttggaagtataggccctctcttccagccccatcaaaatttgtttcccttcttcctgccttccctttctctatgcagacccaggccaagagcactaagggtgcttggagatccgtaaagggctgttggctttgacttcttctctctcttttatcatctactccaaacttctgctcttcctagaaccctttgctaggtgtggttttgttgcccaggctggagtgcaatggcacaatctcggctcactgcaacctccgcctcccaggttcaagtgattctcctgcctcagcctcccgaatagctgagattacaggcatgtgccaccatgccgggctaattttgtatttctagtagagatggggtttctccatgttcgtcaggctagtcttgaactcccaacctcaggtgatccacccgcctcagcctcccaaagtgctaggattacaggcatgagccaccacgctgggcccatcacccttctttctgaagagtcaatggaagttgtgtgtaggaagacaggcttaacggtttttttttgagacagggtcttactctgtcacccagactggagtgaagtggtgcgatcttggctcaccacaacctctgcctcccaggctcaaaagattctcctgcctcagcctcctgagtagctgggattataagtgtgtgccaccacacatggctatttttttttttttttttttttttaatttttagtagagatggggtttcaccatgttggctaggctggtctcaaactcctgacttcaaatgatccacctgcctcggcctcccaaagtgctgggattacaggtgtgagctaccatgcccggccatcaacctttattttgtttttttgagacggagtcttgctttgttgcccaggctggagtacagtagtgtgacctcaggtcactgcaacctctgcctcccaggttcaagccatgctcctgcctcagcctcccaagtagctgggactataggtgcctgccaccacgcccggctactttttatatttttagtagagacggggtttcaccatgttggccagggtgatctcgaactcctgacctcaagtgatctgcctgcctcagcctcccaaagtgttgggattagagacgggagccactgcgcctggcttctttttttcttgagatagggtttcactctgttacccaggctggagtgcagtggcaaggtcatggctcactgcagcctctacctctctggctcaagccatcctcccgcctcagcctcctgagtagctgggaccacaggcaggcaccaccacccacagctaatgtttttgtattattttgtagagatggggttttgccatgttgcccacagtcttgaactcctgggttcattctgctgaaagagaccacacctgtccttttctttatttttattatatttttcagagacagggccttgccctgttgctcaggctagagtgcaatggtacaatcataacttgctgcagcctggaactcctcctgggctcaagcgatcctaccgtctcaccttccggaatagctgagactaagggcaggcaccaccacgcttggctaatttttttttttttttttttttttttgctttttgtttgtaaagatggaaacttgctatgttgctcagctggttccgaagttttggcctcaagcaatcctcctgcctcggcctccggaagcactgggattacaggcataagccaccaggcctgacgccaggcctgtcttttttctactagtgatatgaacaatttagttagcaagacagataggaagcaaggaaggggagacccagagaattcgttgcattctaaactagtccactcatctaccaaagccctgtgaaggacatttttagcagttttagcagttttctggtcaaaactttgatcgagaaacagattgagtggattcgatattctcttgctcacccagccacgccagtttgtctcctctgcctcctagtgcagctgtccaggcctgggacaccaggcgggtatgtgcgcatgtggggcagggcggaggtggtgtgtgtacttgttatatttagccacctccctctgttctcccccactgatcctggctggaaaggctgggcttccggaaaagagaggtggatttgcacacctggatcccaagctgatagaaagtggggtgaagacaaaggggactcagactggggtgtctgtcctcttctatgcccacagtaggaggagccaggattggttactccctgctgggtctgctgtgctcagagtgaggtagagaagtgggtagagtaaagaatttgggagaggaaaaaaggcattttcccaacccctcccaccaaagcctagagagaaggtgttgtctggtttaatgtttaattagagctcagagttcagggccagatttggagttgggatggaaagttgtttttaagaccctgtagcaatttttgacccagcctgggtacctcaaccacactcaggagtttgggggaccttctgttgggctggattataggctccaagaagaaacccctttcgccaatactctctctctcttctttttttgagacagggtcttgttctgttgcccaggctggggtgcagtggcatgatcacagctcactgcaacgtcagcctcacaggctctggtgattctcccacctcagcctcctgagtagctgggattacaagtgtgtgccaccatgcccagctaattttttttttctttttttttttttgagacggagtcttgttctgttgccaggctggagtgcagtggtgcgatctcggctcattgcaacctccacctcccaggttcaagcgattctcctgcctcagcctcccgagtagctgggactacaggcacatgccatcacgcccagttaatttttgtatttttagtagagttggggtttcaccatgttggccaggatggtcttgatctcttgacctcgtgatccgtccaccttggcctcccaaagtgctgggattacaggtgtgagccaccgtacccggccactaatttttatatattttgtagagatggggtttcaccgtgttgcccaagctggtctcgaactcctaggctcaagtaatccacctgccttggccttggcctcccaaagtgctgggatgtataggcatgagctaccgcacctggtaccccctgccccttctctgtctctttctagtctgtagcccaagggatttggatacccaagtgcaggcagaatgggaaggttgtaagcaccagggaagcctgtctggagtccaggcttgcagctgggccccaccccaggcaaggcagctgggtggatgactcagatgctgcccccctccctcccaccctggtggctttacagaagacagcaggagacagggtggagacagcagttgtcttaaagggaggagtggtggtctgaatgtctacctcttctgcccccctccccattgcatcctggagtcccttgcctggctccttcctgagaccctctggtggtgtctggacacatagctctctctggacaggtaacatgcacaagtaattagaatccagagttgagttcagagttatggattgggctgcaggatagtgccagggtctgtgccttcccatgtgaaactgatggaggaaggctgagtcagaagtggggagatccgaggcccacaaagcagaagcgctacttccactccaaaaaggccctggtgcttgacaacttcctggattgcccactgttgcagccccagtgtggacaggcagggagatgcaggctccagttcatgtaggctctgatcaagacaagaacagcaaaggccacagaggcacagatgcttgtcccatgtcacacaataaaggggtcagcacttgatcacaggccttatgacttccagctgggtgtgctcttaccattaagcctcacttctctagcttgggggacaggttggagggaggatctagagggtgaggtaaggtgaagtcaggtagctgaggctcacttctgcagcctggaaactctgctctggggccagtgacaccttagtgctctatggccatacttcgtggctcatgcctgtaatcccagtgctttgggaggctaaggcaggaggatcacttgaggccaggagtttgagaccagtctgggcaacatagcaagacccccttctgtacaaaaaaattagccggtcaacacctgtagtccagctgcttgggaagctgaggcgggaggatcacctgaagccaggagtttgaggctattgtgagctatgactgcactactgcactctagcctgggagagagaaagaccctgtctctgaaaaagaaaaaaacaaaacaaaactctgctgtcctgcagggcctgttagcatatgatcgatagcctttgctccagcctatacctggacccaggacccctgccagcccctcaatcgtgagacggtcagagctctgggaggctggtgattcttgtcttgagactatcttgagacttgtcatgggaattgtccacccggattgaaaggaagctgtgccttttggcagacccattaggttaatggggttggagacctttgaggatgcatgggccctgggctttatctgagggtatctcctggtgttacctctccaaccctccaccaccaaatccattctttttttttttttttttttttttttgacagtctcgctccctggcccaggctggagtgcagtggcatgatcttggcttactgcaatctccacctcccaggctcaagtgatcctcccacctcagcctcccaagaagctgggactataggcacgtgccacatgctcggctaatttttctatttttagtagagaccaggtttcaccatgttactcaggctggtcttgaactctggggcttaagcagtccacccaccttgacctcccaaagtgctgagagccactgagcctagcccaaatccacgttctgattcaaagggaaagaagaagggtgcagctaaacctggggggtgagaagtacttaaaaagcccaagagaaacaaaagagagaataattcctcactaggaccccctattgccttcccactattggtgcccttgcttggcacttcccctggcctccaggagtctgagacttactcttccatggatgtgcccattgcccccacttccaggtccaccccccagtgattcggtagcttagtgtctgcgctgaagcccaggacagctggatggacaactggtagatcccttcacctaccaactgtgctttctgctcccctcccccttgcttccctcctccccagcccctcgccacccctagcagctgcagcagccaagaccaagtcttcagagacccagacacaagggcagggttcattccattctcacctccttggggtcccagtgtactgataggccgaactctaatattataggagatctctggaagattgcagggtctcttatccctcaataaggggcaaggcaagccgggcgcagtggctcacgcctgtaatcccagcactttgagaagccgaggggaacagatcacttcaggtcaggagttaagagaccagcctggccaacatggtgaaaccctgtctctactaaaaatacaaaaattaaccagaaatcgcttgaacccaggaggcagatgttgcagtgagccgagatcacgccactgcactccagccagggcgacagagcaagattccgtctcaaaaaaataatactaataataaataaataaataaggggcaaggtagtccaccaacaaaatgacaggcagtgtgatatagtggacaccctagccctcggtgcccttagttctgtgtgtggccctttcactaaattgctgtgtgaccttgagcaaatcgcctcccctttctggctttccttagctgtaaaagaaagggattggagcggaaagtctccagagaccttttaggttccaaagtagtacagtgacccacaaagtgagaaaacagtcttctaaaataccaagttattaatagtaaaatcaaatataaataatgtgaatatagttaatagctaatgttgttctcaatagaaatgtttcccacaagctgtggaattaaacatactaccacatttctctatttccccgtgaaagtttgttagaaatggttaaattgtgacattaccctcttggcaaatgttttgttttcattgctactaggaaagggcaactcgttttcgatgcctctcccttctggacggtggaaagggctgtgtcatagagtaggaacgggagatgcggcacaggaatggctcccattgacccgggttgggggctagggcgaaggcctaggagaggcagaactgttaccttagagctggccaggattagagaacagtgcctggaaccggggggaggggcacggtgaccttgggctgcccaccttctacccttccagcacccatactggctcccccaacctgcggctgggctgggaggaggtcttggcccctaccaatcccttaaggaaggggaaagagtttgggaaggggagtcctcccttcacccctgcctcccccaagttgtgagagaggaagccggaatcctgcctgctgaagccaggaataattctggctgagatcccaggcccggcaggggcgctgagtcatggtagagggcagagtggagagtggacaggagaccctaagcttgtccagtcagaaaagcagaggctgaggggtggccttttcttgagaactacattcaagttgcagcaagaaggacagtggtctgaatttgacggggacaaatggaagggagataggacacatgagttcctttaggtctggctcaggggagctagacttcatttcaaggggtctaggttctgggcagttgagaaggaggctatttggggtcaccaaggctcccctttcttcccaaagctctaacactgccaccttctgctggctaggagagagctgtgtcttctgaggctagagctggaatgcagtgagaccagactgcctaggtcctccctcacttcttctcctgaccttggggtgtggctcccactctctcccagtgtcctcagggttaataactatgtgccaccagatagagagttaaggggctgctgaattggcttcttgtgaagggaatcccctaaatgtccctcgttttggtcactggcctccctcccgcccccttcaggacattctactatcttcttaggccatccctccctcctccaggcactacttcttttgctctatccccaagccccacccctgcatttttgtgacaacaccggaatgatttctagagagagaggccaggaagaaggaaagtggcacttggcaggagaccttgcagggggcggctggtgaggaagccagccgcccattgtccaggaccccagtgccctggcctccggcctcaggcttctcctgcctctgtacaatgccacgttgatacgcccagcagctgtgactcaggcctggccccctgccaggcccagcacttctactggagttgcgtctgaacatgtcaacaggcttcctatccctctctcagcaccagttctccccacttcagcccctccctctgcctggaattaaaacctggctttgtcttagggaaggacagctgggagcctagtggctctggtaggggatctgagaggcctcagaccctaggcatatttggctgtttggcaggtgtcacgcccaagggaagcgtgtggaagcagagccatgcctgctgtgggtgcacatgcccgcgtgagggagtcggggtgtttcatcctggggcacctgtgggcttttgaggtgtatgatattcagaacttcacaggttggggtttggggaaggctcaaggggcttctaagtccctggaacagctgcccccctcagttcctctctctctctctctttttttttgagatggagtctcgctctgttgcccaggctagaatgcagtggcgcgatcttggctcactgcaaactccgcctcctgggttcaagtgattctcctgcctcagcctcccaagtagctgggactataggtgcccgccaccatgcctggctaatttttgtatttttagtagaaatggggtttcaccatgctggccaggatggtctcaaactcctgacctcgtgatccacccaccttggcctcccaaagtgctgggattacaggcgtgagccactgcgcccagcctcagttcctctctttaaggtctcctttccagagagggatagcacctcaaatgccagggaggggaattctccacatcctgcccttacccgagttgtggcagacccacagactagccaagaaaccaagcagtggttactttgccgggttgggggggaggtaggggctatcaaacctcatgattggccgcacacaaaggtgtgagtatgtgtatatttgagggtgggtgggagtggcactttcactaggcctccgtatcactctctgactggggtatctcccagcaagcgagacagaggcagacacgcttcccagactgtcttactgggtctctctgtgttattctctgcagtgtctgtgtgtatcgtgccattttctatgttttgcaccaatctgctgtgagtgtcctcaggtgacctgggggcaggtttttagtgcctgagcctacccgtctccaggctttagtttccccctgtaaaagtataggagttggttcaagagaaggttcctctagaagccttgagcctgtgaaccgtctagtctccgggtatttgtgggacacacagaaaaagccccacgacccaacaggtagaacactggctgaaatcagcagggcagagctgagacaggctcaagtaggctgaggggtagggaggttttgggtgaatgggagggagggacagagagaaggaggatatattgcagtaggaggagttgctggaacaaaaggaggggtggtaggagtggcttggggtggcagcagaagacgccctgtcacatggcgggaagtcagcctgggcagaggtctaggtgtccaggaggggctgggtgtggtggctcacgcctgtaatcccaggactttgggaggctgatgcaggaggatcacgtgaggtcaggagttcaagaccagcctggccaacatggcgaaaccctatctctactaaaaatgccaaaaattagctgggtgtggtggcaggcgcctgtaatcccagctactctggaggctgaggcacaagaattgcttgaacctgggaggtggaggttgcagggagccgagatcgcgccactctactctagcctgggcaacacagtgagactctgtctcaaaaataataataataggggctgggcgcggtggctcatgactgtaatcccagcattttgggaggtggaggcgggtggatcacctgaggtcaggagtccgagaccagcctggccaacatggcaaaactccgtctctactaaaaatagaaaaattagctaggcatggtggtgcaggcctgtaatccagctactcgggaggctgagaagcaggagaatcacttgaacctgggaggtgaaggttgcagtgagatcacctgggcgacagaatgagactccacctcaaaataataataatagtaataataataaatgaaaaattttaaaattaaacaattaaaaattttaaattaaaattaaacaaattagatgcccaggaggatacaggagagcatttgccaccaggcggactccctgtacccacccggccacagggggcgatgttcctgggagacaggaaatgcccaggggctgggagaccctctgctcttctgctcccttcctgtgtgctgcctggcaatggggaactctgagggctggtgagcagggctgctgaggagtgggtctaaggagtccctgcagggctgggccagctcctccacctcccctttgtcttcccctcccacttgttatttttagctacagtgtctgtccctcttgcttctcccccagattgggagaggaaacggaggcctctccctccgggcctagcctgttgcccccagcaaccgggcccaaacaggcctgtggccggccctggcttccatatctggcatcagagttgggctgagcagggtgactcagagggtgggtcagcgcctggcccggtgcccacctagcccctttgctgtgctggtgcctttcttccccaaacagccccaagggcccgggcctgctgcagctggggagccggacttccttgtcccaccaggcacagctcttcagacccctgccttgggtcacatttgcaagtgccaactctcatttctaccttattcttttcctctctgttcccctccccaccccctctcttccctctttctgagatcagatttgccagtgatgggaagagttagaaacaggatgcccagcccttctcgcctcaagaggccactgggatgcagccactcctgtgcttggggaacctggaggatgcaagggaaaggactggcactctgctggcacagcacccggcctggggcaggacacgggcgaagccagggtctcccctgtgagcactagaggatttcccgacccctgcccgggtattgtgtgcctgagcatgagtcacctgaggggcccaggttcccacccttcccagctcctctggcctgccccaccctgtcctccctgccaacccagcacggggacggcactcagcgtgtgctcagctttcctgatgccaacccccagtggagtgggctgcaccaccaccctgggaccgaatgcctggctagggtctactttggtccctgctaggtctgaggacccctcctaggaaggaaatggcacttgggggcgggggcagggaggagggaggagagacactgggctctactgtacccctagtcatctcttggggtgtgcgtgtggctccctggccacagagctcccaaggtctgagtcatgagcccatgggtgatagtggcttcttccccgcagatgggagctccccgtgcctaagaaaaccacaaaggttcttcctcacttccctctctgctcgtggtttttctcatctgcagggtgtgtcttagtcctttaatctcctctctttgcagtgctagtcaaaacctccaccagggaaagacaaataacccccttactgtttttttttttttttttttttttttttgagatggagtctcgctctgtcacccatgctgtagtgcagtggcacaatctcggctcactgcaacctccgcctcccaagttcaagtgatcctcctacctcagcctcctcagtagctgggactacaggtgcacaccaccgtacccagctaaattttttttttttttttttgagatagagtctcactctgtcacccaggctggagtacagtggtacaatctcaactcactacaatctccgcctcccaggctcaagcaattctcgtgtctcagcctcccaagttgctgggactatggacgtgcaccaccttgcccgactaatttttgtatttttgatagagtcagagtttcaccatgttggcaggctggtctcgaactcctggcctcaagtgatccacctgccttggcctcccaaagtgctgggattacaggtgtgagccaccacactcagccagcccccttactttccttggagaccatatactgtggcttgtgccaaagtggtacagcatggatttccagctcccctatctacttgctgcgggaccctagatatagctttctgtgcctatttcctcaattgcataggaatagcacctatcgcatagggtagctgtgaagatgacgtgagttaacataatatttagagcagtgcttggtacctaataagctctatataagtgtttgctattatattattattatcactgccaccaccgcttttgcaagcagcagaaggtgaagaggttagactgaagaaaaaacttctgtgctcatcagcccataagctcgcagagcacagggatcatgcatctatgttttcctcagtcagtgtctgccaggcactggcaaggaaaggctgttaccagggggaactccaggaattcctcctggcacctaaggaggctggggagacaggactagggaaaaggtgcccttgagacaccttctgaaatcatcccattgccttccagcttctttcagctcaggctggctggtcagggaaacgctttgtgccatagtgtctgccctcttcctcctcctggcttctccattctctctggaacttgtggcttaggaaagcagtgaggtggaggaggaggaaccctagatcagcagctagaattgactggaatgctgctgctggctttcggtaattgacactgggccattcaccttcctcctttgcacctcagtttcctcatctataaaagggagagggttgagctgaatcaactctaagctccttctagttctctaaattctgagagcctcctagtacagccagcagcagccattagccttcagggtagagaggcctcttctgggaagccccagccagcctgggggtcagcccaaggagctcggaatctaagttgccccagttgcttcactttaccagcggtttttcttcattttccctcctccccctgcagctgcttcagcttcggaaaagttctgaagtcatggaaagttggggctgtgctcccagccaggggctaggccggatggcagccaaaacctgagctgggttttgactttatttttagcttttctgactgagacagaggagggaatacattctccggttctggaaggggctcttttttgcaggagacagacacttacattaaacaacttgttctgaggtgtggccagaggcctggactgagcaagtgtgcaggctgggggagcttcctctggcttctcatgtccttcccctgcccctctgagtgtcactctatcctcctccctgcctggtggggggaggtgggggtgactccttttttggactctcctaagcagaacactgcctgggtctcgtcctccagagcttctgcaaatctagccttccctatccctcttcacagtgaattgctgggcctcttggagtttaggacttttgtggtagaagaaaaatgttggcagggctgcttttctcctttccaggatagatttttccttctgcccacgcttggttttccttttttccatctgctgtggtgggctcatgcttaagcactgatgagttacagatggcagctggaaccaggtcctctggatctttccctccgctccctgggtctgctgctttctctcaccctatatttgtgaagcaattgtaacatctagaaagttcttgggttctctggaggtttttaagaaaataggacctttctatttctccagtccactagcaaaaataatcaggggcccagaaaaggtgagggaggtggcagaggcagcgctgttcgactggttatagctaaagctttacccactttgaggagcagggaggcttaaagctggggcccagatggacctggaggcctgggatccacatctggaaccagatgctgaggctatggtagatgggtagggctcagccttctcccagggcacggatgaggcaggagggagggaggcagggacccctctgttcagtgcagatcagggcacccagactgggtcctgagaaaggaaagggtcaatattgtgcctggtcatccttgtctgaggtccctctgagctctaaccagactttccttccccacagtcccacatgtgtaaaagggactaggagaggtgaccagtacctttggggctcagatcgagaagtgctagggacatgtgggccatgagcttagttgtcaggctcctcagagggagggaagcttggccaaagggaagtgagtagagtccagggagaaggctaagtaaggccctgtgtgggaaggggcaggagacaaaggtacccctgtctctttgggaaagaatgggaggagagagagggaaaagcattcatatcacggggtagagctctgcccttggccccaggcacgttcctgagccctgagtcatgggaagggtggagaagcaggaagggggttttcaaggaccttggggaggtgggagcccagccccagaggcaagcagatgcaaaccaacctaatgcaaggatgccctctcctggtaattgcaggcatagcagcgccagcccccatggctgacctcctgggagcctggcactgtctaggcacacagactccttctcttaaatctactctcccctctcttctttagcaataccaagaaggagggtgacctgatagctgctcaggctcggctgaaggacctggaggctctgctgaactccaaggaggccgcactgagcactgctctcagtgagaagcgcacgctggagggcgagctgcatgatctgcggggccaggtggccaaggtgaggccaccctgcagggcccacccatggccccacctaacacatgtacactcactcttctacctaggccctcccccatgtggtgcctggtctgacctgtcacctgatttcagagccattcacctgtcctagagtcattttacccactgaggtcacatcttatcctaatttggctgccaatgggatctaccacagtgaatttaaaataatccaggaggccgggcatggtggttcacgcctgtaatcccagcactttaggaggccgaggtgggccgatcacgaggtcaggagatcgagatcatcctgactaacatggtgaaaccccgtctctactaaaaatacaaaaaattagcctggcatggtggcgggcgcctgtagtcccaactactcgggaggctgaggcaggagaatggcgtgagcctgcgaggcagagcttgcagtgagctgagatcatgccactgcactccagcctgggcaacagagtgagactccgtctcaaaaaaataataataataataataaaaataatccaggccatgtgtggtggctcatgcctgtaatcccagcattttgggaggccaaggaggcaggattgcttgagtccaggagtttgagaccagcctgggcaacacagaccccatctctagaaaataaaaatttaaagaaattagctgggcatggtggtgtgcacctatagtcccagctacttgggaggctgaggcaggaggatggcttgaacctgagaggtcgaggatacagtgagctgtgattgcaccactgcacttcagcctgggtgacagagggaaaccctgtctctacataaataaatacataaaataaaataatccacaagccatttctacttaactttgcaatgaactgtacctgaccctagatccctcccagtttggccctccggtatacaagggcctcctataggcccttgtgatttctctggggaaaaggaggactggagttgatcatttattgaggccatcagaagcggatggctaattacatatgggacatgtgttaataatgctttgtgtatatagagtggcctttactttcaaaacactcttctccaatttatcatgttaaaagctaggaattgggctgggtgcagtggctcacgcctataatcccagcactttgggaggccaaggcgggtggatcatttgaggtcaggagtttgagaccagtctgaccaacatggttaaactccgtctctactaaaaatacaaaattagccaggcgtggtggcacacacctgtagtcccaacaactacttgtgaggctgaggcaggaaaatcatttgaacccaggatcagaggttgtggtgaactgagattgcaccattgcactccagcctgggcaacaagagcaaaactctatctcaaaaaaaataaaaaatagccaggcacggtggctcatgcctgtaatcctagcactttgggaggcagaggtgggcagatcacctgaggttaggagttcgagactagcctggccaacatggtgaaaccccatctctactacaaatacaaaaattagctaggcatggtggcagccacctgtaatcccagctacttgggaggctgaggcaggagaatcgcttgaacccgggaggtggaggttgcagtgagccaagatcgggtcacagcactccagcctaggcaacagagcgagactccatctcaaaaaaacataaataaataaaaataaaaataaataataaataaaagctaagaatcaaagaagcagtttattcctaatttcacagtctcatctgttcatagtggggccaggattagagtcagtggccaagcttccatcctgggttctttcccttcccaggccctaccatcatagtataccagggaaagacctggagaagccagcaggttgaccaccgaaccaaggctgggccaccttcctcctgggtctggtctccagcctcccagttgtacccttcccccagcccttcctggatgcactgatcagcctgtgcttccttgccctgtttttctttataaatagagccatgttctcctctctctctctctcttttttttttttttttttttgagatggagtcttactctgtcacccaggctggagtgcaatggcacgatctcagctcactgcaacctctgtctcccaggttcaagcaattctcctgcctcagcctcccgagtagctgggattacaggtgcccaccaccatgcccagctactttttggatttttagtagagacagggtttcaccatgttggtcaggctggtcttgaactcctgaccttaggtgttctgcccgcctcagcctcccaaagtgctgggattacaggcgtgagccaccacgcctggcaagacgtgttctctctatgttgttgaggctggtcttgaactcctggctgcaagagatcttcctgcctcagcctcccaatgtgctgggattataggcatgagccaccacacttagcccagcctgtgctttcttaaatgaaaatctaagcatacggctgggtgtggtggctcacgcctgtaatcccagcattttgggaggccaaggtgggcagatcacgaggtcaggagatcgagactatcctggccaacatggtgaaaccctgtctctactaaagatacaaaaattagctgggtgtggtggcccatgtctgtagtcccagctactcgggagactgaggcaggagaatggcatgaacctgggaggcagagcttgcagtgagctgagatcgcgccactgctctccagcctaggtgacagagcgagactccatctcaaaaaaaaaataaaaataaaaaaaagaaaatctaagcgtggtgctcccctgctcaaacatcctcaggttcttttcatggcagataagggcatctcttcatgagccagcccctgcctactgacccagccacctctcccatcccttcccaccccgtacttcaggcttcagcagtactgatctttccaaagaccccagaacacacatgccttcatacctctgtgcctgtacatgcttgtttctgcccttgaaatcatgacagtagctctctgtaggccccgctagcctgtcccttgggtcttagcctcttggaggccttcccagagccccccaaaagtaccccaggcatactttggttccttctctcatgtcccctcagtactttgcacatacctcctttatagcagttgctatgttgtgccagagaagggagtcctgtggctggggggcatatatcttttctttttgagacagagtctagctgtgtcacccaggctggagtgcagtagtgcgatctcggctcactgcaacctccacctcctggattcaagcgattcttgtgcctcagcctcctgagtagctgggactacaggcgtgtgccaccatcatgcctggctacttttttgtattagatatatattttctctcttagcacagtacctaccaagagtgagtgagtagatgtcctgacccctgcaggcatccaaggccctccttccctggacctgtttccacatgtgtgaaggggtgcacaggcagcagcccacctctcagcttccttccagttcttgtgttctgtgaccccttttcctcatctctgcctgcttcctcacagcttgaggcagccctaggtgaggccaagaagcaacttcaggatgagatgctgcggcgggtggatgctgagaacaggctgcagaccatgaaggaggaactggacttccagaagaacatctacagtgaggtggggactgtgctttgcaagccagagggctggggctgggtgatgacagacttgggctgggctaggggggaccagctgtgtgcagagctcgccttcctgagtcccttgccctagtggacagggagttgggggtggccagcactcagctcccaggttaaagtggggctggtagtggctcatggagtagggctgggcagggagccccgcccctgggtcttggcctcccaggaactaattctgattttggtttctgtgtccttcctccaacccttccaggagctgcgtgagaccaagcgccgtcatgagacccgactggtggagattgacaatgggaagcagcgtgagtttgagagccggctggcggatgcgctgcaggaactgcgggcccagcatgaggaccaggtggagcagtataagaaggagctggagaagacttattctgccaaggtgcttgctctcgattggttccctcactgcctctgcccttggcagccctacccttacccacgctgggctatgccttctggggatcaggcagatggtggcagggagctcagggtggcccaggacctggggctgtagcagtgatgcccaactcaggcctgtgcctccacccctcccagtcaccacagtcctaaccctttgtcctcccctccagctggacaatgccaggcagtctgctgagaggaacagcaacctggtgggggctgcccacgaggagctgcagcagtcgcgcatccgcatcgacagcctctctgcccagctcagccagctccagaagcaggtgataccccacctcacccctctctccaggggcctagagtctgggccggatgcaggctggaagcccagggttgggggtgggggtgggggtgggaggttcctgaggaggagagggatgaaaagtgtccccacaaccacagagaagggtcgcaggatgtggagtcagatggcctgtgtgctgtttctgtacactcttacctcaccttcacttctcagggctttggttttcccattcgaaaatggaggctgttcttaatctccctaactcagagttgccacaggactctgcaatgtgaggtgttaaaagcatcagtatttttctagttggctgtgctatttgtgacaggagaaaaagtctagcctcagaacgagaggtttcagttagacaaggggaaggacttcccagttgccagccaagactatgtttagagcttgtgatgttcagagctggctctgatgagggctctggggaagctctgattgcagatcctggagagagtagccaggtgtctcctacaccgacccacgtccctccttccccatacttagggcccttgggagctcaccaaaccctcccaccccccttcagctggcagccaaggaggcgaagcttcgagacctggaggactcactggcccgtgagcgggacaccagccggcggctgctggcggaaaaggagcgggagatggccgagatgcgggcaaggatgcagcagcagctggacgagtaccaggagcttctggacatcaagctggccctggacatggagatccacgcctaccgcaagctcttggagggcgaggaggagaggtgggctggggagacgtcggggaggtgctggcagtgtcctctggccggcaactggccttgactagacccccacttggtctccctctccccaggctacgcctgtcccccagccctacctcgcagcgcagccgtggccgtgcttcctctcactcatcccagacacagggtgggggcagcgtcaccaaaaagcgcaaactggagtccactgagagccgcagcagcttctcacagcacgcacgcactagcgggcgcgtggccgtggaggaggtggatgaggagggcaagtttgtccggctgcgcaacaagtccaatgaggtaggctcctgctcagggtctaaggggatacagctgcatcagggagagagtggcaagacagaaggatggcatgtggagagaggaacatccttgccctcagagggtggaccagggtgagcctgtatatctcctccacactctggttccaggcctggctcctggactctttggctgtgagaccttgagcaggttatttaacctctcagagcatcagtttcctcatctgtaaaatggggatgaatactgatccctaagtctttgagttgtcaggaagatgaaagataaggtatccgtgtgcctggtgctgcgtatgtgtccacagatcatggctattatccccgggggaagggcagtgacaggggtgtgtgtagatggaaggagaggcctcaattgcaggcaggcagagggctgggcctttgagcaagatacacccaagagcctgggtgagcctccccgaccttcctcttccctatcttcccggcaggaccagtccatgggcaattggcagatcaagcgccagaatggagatgatcccttgctgacttaccggttcccaccaaagttcaccctgaaggctgggcaggtggtgacggtgagtggcagggcgcttgggactctggggaggccttgggtggcgatgggagcgctggggtaagtgtccttttctcctctccagatctgggctgcaggagctggggccacccacagcccccctaccgacctggtgtggaaggcacagaacacctggggctgcgggaacagcctgcgtacggctctcatcaactccactggggaagtaagtaggcctgggcctggctgcttgctggacgaggctccccctgatggccaacatcggagccagctgcccccaacccaagtttgccaattcagggcccctttctagagctctctgttgcaggctccagacttctccacccagtaggcaaaccaaaagatgcttcctcaacagcacaaggggtggaagttagacagtgaggattgttaaaggcagagccatactcctacccggagagcttgacagtgtccctctggggtggaaatgagttccttagctccatcaccacagaggacagagtaagcagcaggccggacaaagggcaggccacaagaaaagttgcaggtggtcactggggtagacatgctgtacaacccttccctggccctgacccttggacctggttccatgtccccaccaggaagtggccatgcgcaagctggtgcgctcagtgactgtggttgaggacgacgaggatgaggatggagatgacctgctccatcaccaccacgtgagtggtagccgccgctgaggccgagcctgcactggggccacccagccaggcctgggggcagcctctccccagcctccccgtgccaaaaatcttttcattaaagaatgttttggaactttactcgctggcctggcctttcttctctctcctccctataccttgaacagggaacccaggtgtctgggtgccctactctggtaaggaagggagtgggaactttctgatgccatggaatattcctgtgggagcagtggacaagggtctggatttgtcttctgggaaagggaggggaggacagacgtggggcatgcccgccctgcctctctcccccattcttgttgcatgcatatcctctcatttccctcatttttcctgcaagaatgttctctctcattcctgaccgcccctccactccaattaatagtgcatgcctgctgccctacaagcttgctcccgttctctcttcttttcctcttaagctcagagtagctagaacagagtcagagtcactgctctggttctctgtccccaagtcttcctgagccttctccccttttatgtcttccctctcctcctccgggcccctagcctcccaaacccccattgcccgctggctccttgggcacagaaccacaccttcctgcctggcggctgggagcctgcaggagcctggagcctggttgggcctgagtggtcagtcccagactcgccgtcccgcctgagccttgtctcccttcccagggctcccactgcagcagctcgggggaccccgctgagtacaacctgcgctcgcgcaccgtgctgtgcgggacctgcgggcagcctgccgacaaggcatctgccagcggctcaggagcccaggtgggcggacccatctcctctggctcttctgcctccagtgtcacggtcactcgcagctaccgcagtgtggggggcagtgggggtggcagcttcggggacaatctggtcacccgctcctacctcctgggcaactccagcccccgaacccaggtgagttgtctctgctttgtctccaaatcctgcaggcgggtccctggtcatcgaggggtaggacgaggtggccttgcaggggggagagcctgccttctcttccgcagcccgggggagtgggagcctcctccccacagcctgagtcctagacagcccacctctgcatcctgcccctcttgtctgagccccagactggagggcaggggcagggctggagtgtgagggatgggggagatgctacctcccttctaggggccaggggagggagggtctgggtccaggccctgctgctcacacctctctcctctgttttctctcttagagcccccagaactgcagcatcatgtaatctgggacctgccaggcaggggtgggggtggaggcttcctgcgtcctcctcacctcatgcccaccccctgccctgcacgtcatgggagggggcttgaagccaaagaaaaataaccctttggtttttttcttctgtatttttttttctaagagaagttattttctacagtggttttatactgaaggaaaaacacaagcaaaaaaaaaaaaaaagcatctatctcatctatctcaatcctaatttctcctcccttccttttccctgcttccaggaaactccacatctgccttaaaaccaaagagggcttcctctagaagccaagggaaaggggtgcttttatagaggctagcttctgcttttctgccctggctgctgcccccaccccggggaccctgtgacatggtgcctgagaggcaggcatagaggcttctccgccagcctcctctggacggcaggctcactgccaggccagcctccgagagggagagagagagagagaggacagcttgagccgggcccctgggcttggcctgctgtgattccactacacctggctgaggttcctctgcctgccccgcccccagtccccacccctgcccccagccccggggtgagtccattctcccaggtaccagctgcgcttgcttttctgtattttatttagacaagagatgggaatgaggtgggaggtggaagaagggagaagaaaggtgagtttgagctgccttccctagctttagaccctgggtgggctctgtgcagtcactggaggttgaagccaagtggggtgctgggaggagggagagggaggtcactggaaaggggagagcctgctggcacccaccgtggaggaggaaggcaagagggggtggaggggtgtggcagtggttttggcaaacgctaaagagcccttgcctccccatttcccatctgcaccccttctctcctccccaaatcaatacactagttgtttctacccctggc

SEQ ID NO: 194 - DNA, 25424 bp, Homo sapiens
agaggaggacctattagagcctttgccccggcgtcggtgactcagtgttcgcgggagcgccgcacctacaccagccaacccagatcccgaggtccgacagcgcccggcccagatccccacgcctgccaggagcaagccgagagccagccggccggcgcactccgactccgagcagtctctgtccttcgacccgagccccgcgccctttccgggacccctgccccgcgggcagcgctgccaacctgccggccatggagaccccgtcccagcggcgcgccacccgcagcggggcgcaggccagctccactccgctgtcgcccacccgcatcacccggctgcaggagaaggaggacctgcaggagctcaatgatcgcttggcggtctacatcgaccgtgtgcgctcgctggaaacggagaacgcagggctgcgccttcgcatcaccgagtctgaagaggtggtcagccgcgaggtgtccggcatcaaggccgcctacgaggccgagctcggggatgcccgcaagacccttgactcagtagccaaggagcgcgcccgcctgcagctggagctgagcaaagtgcgtgaggagtttaaggagctgaaagcgcggtgagttcgcccaggtggctgcgtgcctggcggggagtggagagggcggcgggccggcgcccctggccggccgcaggaagggagtgagagggcctggaggccgataactttgccatagtctcctccctccccggaactgcccccagcgggtgactggcagtgtcaaggggaattgtcaagacaggacagagagggaagtggtggtctctgggagagggtcggggaggatataaggaatggtgggggtatcagggacaagttggggctggggccggcctgaattcggtcagattgggatttgccaactatctggagccggggggaggggcttgagcaaaacagaactagccctgccagctcgaagaactctgggcacccaggacacatcggagtggcagaaagggtcctgttagaactttgttagcgggcttggcactgtgctagctttgcccaagctggctctgaacacatgatgcccactaagacataactctcaagttggcatctgtccagcgtgttggagcgaggtcaggaaggcagggcaatcccccttttccctcccaagggcttggcggtggccccccctcagcatgaccttgtcctgggttctaagggttgggaagttctccctcactctgccactctgcgtgtctgggaccttccttgggctctgacaggcccaccaaaagagctccgggagatgagagatcggctcccccgcagctcccacagcccttggcctgcttggcccaggaatgcaagggagggagggaggcagagggcagaggctcccagctcaggaagttgtgttatgcccaggtctggccgcactcctcccttggccctctgcctagtgtcttcgagggttgggggcactgtccttccctccttggggtgagccactttcattttcccagcggggccaggcagtctttgctcgggcccatcctcttagctgctgacgttttgatctttgtcttattgaagtgctggaatacagtgacatttttgaaatccagccgttggaagattcaggccactcccactttacccacccctgccccaccctaccccaccctactcaactgcaccttcttcttttctaaaaaagcctttgggagcttggaagtataggccctctcttccagccccatcaaaatttgtttcccttcttcctgccttccctttctctatgcagacccaggccaagagcactaagggtgcttggagatccgtaaagggctgttggctttgacttcttctctctcttttatcatctactccaaacttctgctcttcctagaaccctttgctaggtgtggttttgttgcccaggctggagtgcaatggcacaatctcggctcactgcaacctccgcctcccaggttcaagtgattctcctgcctcagcctcccgaatagctgagattacaggcatgtgccaccatgccgggctaattttgtatttctagtagagatggggtttctccatgttcgtcaggctagtcttgaactcccaacctcaggtgatccacccgcctcagcctcccaaagtgctaggattacaggcatgagccaccacgctgggcccatcacccttctttctgaagagtcaatggaagttgtgtgtaggaagacaggcttaacggtttttttttgagacagggtcttactctgtcacccagactggagtgaagtggtgcgatcttggctcaccacaacctctgcctcccaggctcaaaagattctcctgcctcagcctcctgagtagctgggattataagtgtgtgccaccacacatggctatttttttttttttttttttttttaatttttagtagagatggggtttcaccatgttggctaggctggtctcaaactcctgacttcaaatgatccacctgcctcggcctcccaaagtgctgggattacaggtgtgagctaccatgcccggccatcaacctttattttgtttttttgagacggagtcttgctttgttgcccaggctggagtacagtagtgtgacctcaggtcactgcaacctctgcctcccaggttcaagccatgctcctgcctcagcctcccaagtagctgggactataggtgcctgccaccacgcccggctactttttatatttttagtagagacggggtttcaccatgttggccagggtgatctcgaactcctgacctcaagtgatctgcctgcctcagcctcccaaagtgttgggattagagacgggagccactgcgcctggcttctttttttcttgagatagggtttcactctgttacccaggctggagtgcagtggcaaggtcatggctcactgcagcctctacctctctggctcaagccatcctcccgcctcagcctcctgagtagctgggaccacaggcaggcaccaccacccacagctaatgtttttgtattattttgtagagatgggggttttgccatgttgcccacagtcttgaactcctgggttcaataaactgaaagagaccacacctgtccttttctttatttttattatatttttcagagacagggccttgccctgttggctcaggctagagtgcaatggtacaatcataacttgctgcagcctggaactcctcctgggctcaagcgatcctaccgtctcaccttccggaatagctgagactaagggcaggcaccaccacgcttggctaatttttttttttttttttttttttttgctttttgtttgtaaagatggaaacttgctatgttgctcagctggttccgaagttttggcctcaagcaatcctcctgcctcggcctccggaagcactgggattacaggcataagccaccaggcctgacgccaggcctgtcttttttctactagtgatatgaacaatttagttagcaagacagataggaagcaaggaaggggagacccagagaattcgttgcattctaaactagtccactcatctaccaaagccctgtgaaggacatttttagcagttttagcagttttctggtcaaaactttgatcgagaaacagattgagtggattcgatattctcttgctcacccagccacgccagtttgtctcctctgcctcctagtgcagctgtccaggcctgggacaccaggcgggtatgtgcgcatgtggggcagggcggaggtggtgtgtgtacttgttatatttagccacctccctctgttctcccccactgatcctggctggaaaggctgggcttccggaaaagagaggtggatttgcacacctggatcccaagctgatagaaagtggggtgaagacaaaggggactcagactggggtgtctgtcctcttctatgcccacagtaggaggagccaggattggttactccctgctgggtctgctgtgctcagagtgaggtagagaagtgggtagagtaaagaatttgggagaggaaaaaaggcattttcccaacccctcccaccaaagcctagagagaaggtgttgtctggtttaatgtttaattagagctcagagttcagggccagatttggagttgggatggaaagttgtttttaagaccctgtagcaatttttgacccagcctgggtacctcaaccacactcaggagtttgggggaccttctgttgggctggattataggctccaagaagaaacccctttcgccaatactctctctctcttctttttttgagacagggtcttgttctgttgcccaggctggggtgcagtggcatgatcacagctcactgcaacgtcagcctcacaggctctggtgattctcccacctcagcctcctgagtagctgggattacaagtgtgtgccaccatgcccagctaattttttttttctttttttttttttgagacggagtcttgttctgttgccaggctggagtgcagtggtgcgatctcggctcattgcaacctccacctcccaggttcaagcgattctcctgcctcagcctcccgagtagctgggactacaggcacatgccatcacgcccagttaatttttgtatttttagtagagttggggtttcaccatgttggccaggatggtcttgatctcttgacctcgtgatccgtccaccttggcctcccaaagtgctgggattacaggtgtgagccaccgtacccggccactaatttttatatattttgtagagatggggtttcaccgtgttgcccaagctggtctcgaactcctaggctcaagtaatccacctgccttggccttggcctcccaaagtgctgggatgtataggcatgagctaccgcacctggtaccccctgccccttctctgtctctttctagtctgtagcccaagggatttggatacccaagtgcaggcagaatgggaaggttgtaagcaccagggaagcctgtctggagtccaggcttgcagctgggccccaccccaggcaaggcagctgggtggatgactcagatgctgcccccctccctcccaccctggtggctttacagaagacagcaggagacagggtggagacagcagttgtcttaaagggaggagtggtggtctgaatgtctacctcttctgcccccctccccattgcatcctggagtcccttgcctggctccttcctgagaccctctggtggtgtctggacacatagctctctctggacaggtaacatgcacaagtaattagaatccagagttgagttcagagttatggattgggctgcaggatagtgccagggtctgtgccttcccatgtgaaactgatggaggaaggctgagtcagaagtggggagatccgaggcccacaaagcagaagcgctacttccactccaaaaaggccctggtgcttgacaacttcctggattgcccactgttgcagccccagtgtggacaggcagggagatgcaggctccagttcatgtaggctctgatcaagacaagaacagcaaaggccacagaggcacagatgcttgtcccatgtcacacaataaaggggtcagcacttgatcacaggccttatgacttccagctgggtgtgctcttaccattaagcctcacttctctagcttgggggacaggttggagggaggatctagagggtgaggtaaggtgaagtcaggtagctgaggctcacttctgcagcctggaaactctgctctggggccagtgacaccttagtgctctatggccatacttcgtggctcatgcctgtaatcccagtgctttgggaggctaaggcaggaggatcacttgaggccaggagtttgagaccagtctgggcaacatagcaagacccccttctgtacaaaaaaattagccggtcaacacctgtagtccagctgcttgggaagctgaggcgggaggatcacctgaagccaggagtttgaggctattgtgagctatgactgcactactgcactctagcctgggagagagaaagaccctgtctctgaaaaagaaaaaaacaaaacaaaactctgctgtcctgcagggcctgttagcatatgatcgatagcctttgctccagcctatacctggacccaggacccctgccagcccctcaatcgtgagacggtcagagctctgggaggctggtgattcttgtcttgagactatcttgagacttgtcatgggaattgtccacccggattgaaaggaagctgtgccttttggcagacccattaggttaatggggttggagacctttgaggatgcatgggccctgggctttatctgagggtatctcctggtgttacctctccaaccctccaccaccaaatccattctttttttttttttttttttttttttgacagtctcgctccctggcccaggctggagtgcagtggcatgatcttggcttactgcaatctccacctcccaggctcaagtgatcctcccacctcagcctcccaagaagctgggactataggcacgtgccacatgctcggctaatttttctatttttagtagagaccaggtttcaccatgttactcaggctggtcttgaactctggggcttaagcagtccacccaccttgacctcccaaagtgctgagagccactgagcctagcccaaatccacgttctgattcaaagggaaagaagaagggtgcagctaaacctggggggtgagaagtacttaaaaagcccaagagaaacaaaagagagaataattcctcactaggaccccctattgccttcccactattggtgcccttgcttggcacttcccctggcctccaggagtctgagacttactcttccatggatgtgcccattgcccccacttccaggtccaccccccagtgattcggtagcttagtgtctgcgctgaagcccaggacagctggatggacaactggtagatcccttcacctaccaactgtgctttctgctcccctcccccttgcttccctcctccccagcccctcgccacccctagcagctgcagcagccaagaccaagtcttcagagacccagacacaagggcagggttcattccattctcacctccttggggtcccagtgtactgataggccgaactctaatattataggagatctctggaagattgcagggtctcttatccctcaataaggggcaaggcaagccgggcgcagtggctcacgcctgtaatcccagcactttgagaagccgaggggaacagatcacttcaggtcaggagttaagagaccagcctggccaacatggtgaaaccctgtctctactaaaaatacaaaaattaaccagaaatcgcttgaacccaggaggcagatgttgcagtgagccgagatcacgccactgcactccagccagggcgacagagcaagattccgtctcaaaaaaataatactaataataaataaataaataaggggcaaggtagtccaccaacaaaatgacaggcagtgtgatatagtggacaccctagccctcggtgcccttagttctgtgtgtggccctttcactaaattgctgtgtgaccttgagcaaatcgcctcccctttctggctttccttagctgtaaaagaaagggattggagcggaaagtctccagagaccttttaggttccaaagtagtacagtgacccacaaagtgagaaaacagtcttctaaaataccaagttattaatagtaaaatcaaatataaataatgtgaatatagttaatagctaatgttgttctcaatagaaatgtttcccacaagctgtggaattaaacatactaccacatttctctatttccccgtgaaagtttgttagaaatggttaaattgtgacattaccctcttggcaaatgttttgttttcattgctactaggaaagggcaactcgttttcgatgcctctcccttctggacggtggaaagggctgtgtcatagagtaggaacgggagatgcggcacaggaatggctcccattgacccgggttgggggctagggcgaaggcctaggagaggcagaactgttaccttagagctggccaggattagagaacagtgcctggaaccggggggaggggcacggtgaccttgggctgcccaccttctacccttccagcacccatactggctcccccaacctgcggctgggctgggaggaggtcttggcccctaccaatcccttaaggaaggggaaagagtttgggaaggggagtcctcccttcacccctgcctcccccaagttgtgagagaggaagccggaatcctgcctgctgaagccaggaataattctggctgagatcccaggcccggcaggggcgctgagtcatggtagagggcagagtggagagtggacaggagaccctaagcttgtccagtcagaaaagcagaggctgaggggtggccttttcttgagaactacattcaagttgcagcaagaaggacagtggtctgaatttgacggggacaaatggaagggagataggacacatgagttcctttaggtctggctcaggggagctagacttcatttcaaggggtctaggttctgggcagttgagaaggaggctatttggggtcaccaaggctcccctttcttcccaaagctctaacactgccaccttctgctggctaggagagagctgtgtcttctgaggctagagctggaatgcagtgagaccagactgcctaggtcctccctcacttcttctcctgaccttggggtgtggctcccactctctcccagtgtcctcagggttaataactatgtgccaccagatagagagttaaggggctgctgaattggcttcttgtgaagggaatcccctaaatgtccctcgttttggtcactggcctccctcccgcccccttcaggacattctactatcttcttaggccatccctccctcctccaggcactacttcttttgctctatccccaagccccacccctgcatttttgtgacaacaccggaatgatttctagagagagaggccaggaagaaggaaagtggcacttggcaggagaccttgcagggggcggctggtgaggaagccagccgcccattgtccaggaccccagtgccctggcctccggcctcaggcttctcctgcctctgtacaatgccacgttgatacgcccagcagctgtgactcaggcctggccccctgccaggcccagcacttctactggagttgcgtctgaacatgtcaacaggcttcctatccctctctcagcaccagttctccccacttcagcccctccctctgcctggaattaaaacctggctttgtcttagggaaggacagctgggagcctagtggctctggtaggggatctgagaggcctcagaccctaggcatatttggctgtttggcaggtgtcacgcccaagggaagcgtgtggaagcagagccatgcctgctgtgggtgcacatgcccgcgtgagggagtcggggtgtttcatcctggggcacctgtgggcttttgaggtgtatgatattcagaacttcacaggttggggtttggggaaggctcaaggggcttctaagtccctggaacagctgcccccctcagttcctctctctctctctctttttttttgagatggagtctcgctctgttgcccaggctagaatgcagtggcgcgatcttggctcactgcaaactccgcctcctgggttcaagtgattctcctgcctcagcctcccaagtagctgggactataggtgcccgccaccatgcctggctaatttttgtatttttagtagaaatggggtttcaccatgctggccaggatggtctcaaactcctgacctcgtgatccacccaccttggcctcccaaagtgctgggattacaggcgtgagccactgcgcccagcctcagttcctctctttaaggtctcctttccagagagggatagcacctcaaatgccagggaggggaattctccacatcctgcccttacccgagttgtggcagacccacagactagccaagaaaccaagcagtggttactttgccgggttgggggggaggtaggggctatcaaacctcatgattggccgcacacaaaggtgtgagtatgtgtatatttgagggtgggtgggagtggcactttcactaggcctccgtatcactctctgactggggtatctcccagcaagcgagacagaggcagacacgcttcccagactgtcttactgggtctctctgtgttattctctgcagtgtctgtgtgtatcgtgccattttctatgttttgcaccaatctgctgtgagtgtcctcaggtgacctgggggcaggtttttagtgcctgagcctacccgtctccaggctttagtttccccctgtaaaagtataggagttggttcaagagaaggttcctctagaagccttgagcctgtgaaccgtctagtctccgggtatttgtgggacacacagaaaaagccccacgacccaacaggtagaacactggctgaaatcagcagggcagagctgagacaggctcaagtaggctgaggggtagggaggttttgggtgaatgggagggagggacagagagaaggaggatatattgcagtaggaggagttgctggaacaaaaggaggggtggtaggagtggcttggggtggcagcagaagacgccctgtcacatggcgggaagtcagcctgggcagaggtctaggtgtccaggaggggctgggtgtggtggctcacgcctgtaatcccaggactttgggaggctgatgcaggaggatcacgtgaggtcaggagttcaagaccagcctggccaacatggcgaaaccctatctctactaaaaatgccaaaaattagctgggtgtggtggcaggcgcctgtaatcccagctactctggaggctgaggcacaagaattgcttgaacctgggaggtggaggttgcagggagccgagatcgcgccactctactctagcctgggcaacacagtgagactctgtctcaaaaataataataataggggctgggcgcggtggctcatgactgtaatcccagcattttgggaggtggaggcgggtggatcacctgaggtcaggagtccgagaccagcctggccaacatggcaaaactccgtctctactaaaaatagaaaaattagctaggcatggtggtgcaggcctgtaatccagctactcgggaggctgagaagcaggagaatcacttgaacctgggaggtgaaggttgcagtgagatcacctgggcgacagaatgagactccacctcaaaataataataatagtaataataataaatgaaaaattttaaaattaaacaattaaaaattttaaattaaaattaaacaaattagatgcccaggaggatacaggagagcatttgccaccaggcggactccctgtacccacccggccacagggggcgatgttcctgggagacaggaaatgcccaggggctgggagaccctctgctcttctgctcccttcctgtgtgctgcctggcaatggggaactctgagggctggtgagcagggctgctgaggagtgggtctaaggagtccctgcagggctgggccagctcctccacctcccctttgtcttcccctcccacttgttatttttagctacagtgtctgtccctcttgcttctcccccagattgggagaggaaacggaggcctctccctccgggcctagcctgttgcccccagcaaccgggcccaaacaggcctgtggccggccctggcttccatatctggcatcagagttgggctgagcagggtgactcagagggtgggtcagcgcctggcccggtgcccacctagcccctttgctgtgctggtgcctttcttccccaaacagccccaagggcccgggcctgctgcagctggggagccggacttccttgtcccaccaggcacagctcttcagacccctgccttgggtcacatttgcaagtgccaactctcatttctaccttattcttttcctctctgttcccctccccaccccctctcttccctctttctgagatcagatttgccagtgatgggaagagttagaaacaggatgcccagcccttctcgcctcaagaggccactgggatgcagccactcctgtgcttggggaacctggaggatgcaagggaaaggactggcactctgctggcacagcacccggcctggggcaggacacgggcgaagccagggtctcccctgtgagcactagaggatttcccgacccctgcccgggtattgtgtgcctgagcatgagtcacctgaggggcccaggttcccacccttcccagctcctctggcctgccccaccctgtcctccctgccaacccagcacggggacggcactcagcgtgtgctcagctttcctgatgccaacccccagtggagtgggctgcaccaccaccctgggaccgaatgcctggctagggtctactttggtccctgctaggtctgaggacccctcctaggaaggaaatggcacttgggggcgggggcagggaggagggaggagagacactgggctctactgtacccctagtcatctcttggggtgtgcgtgtggctccctggccacagagctcccaaggtctgagtcatgagcccatgggtgatagtggcttcttccccgcagatgggagctccccgtgcctaagaaaaccacaaaggttcttcctcacttccctctctgctcgtggtttttctcatctgcagggtgtgtcttagtcctttaatctcctctctttgcagtgctagtcaaaacctccaccagggaaagacaaataacccccttactgtttttttttttttttttttttttttttgagatggagtctcgctctgtcacccatgctgtagtgcagtggcacaatctcggctcactgcaacctccgcctcccaagttcaagtgatcctcctacctcagcctcctcagtagctgggactacaggtgcacaccaccgtacccagctaaattttttttttttttttttgagatagagtctcactctgtcacccaggctggagtacagtggtacaatctcaactcactacaatctccgcctcccaggctcaagcaattctcgtgtctcagcctcccaagttgctgggactatggacgtgcaccaccttgcccgactaatttttgtatttttgatagagtcagagtttcaccatgttggcaggctggtctcgaactcctggcctcaagtgatccacctgccttggcctcccaaagtgctgggattacaggtgtgagccaccacactcagccagcccccttactttccttggagaccatatactgtggcttgtgccaaagtggtacagcatggatttccagctcccctatctacttgctgcgggaccctagatatagctttctgtgcctatttcctcaattgcataggaatagcacctatcgcatagggtagctgtgaagatgacgtgagttaacataatatttagagcagtgcttggtacctaataagctctatataagtgtttgctattatattattattatcactgccaccaccgcttttgcaagcagcagaaggtgaagaggttagactgaagaaaaaacttctgtgctcatcagcccataagctcgcagagcacagggatcatgcatctatgttttcctcagtcagtgtctgccaggcactggcaaggaaaggctgttaccagggggaactccaggaattcctcctggcacctaaggaggctggggagacaggactagggaaaaggtgcccttgagacaccttctgaaatcatcccattgccttccagcttctttcagctcaggctggctggtcagggaaacgctttgtgccatagtgtctgccctcttcctcctcctggcttctccattctctctggaacttgtggcttaggaaagcagtgaggtggaggaggaggaaccctagatcagcagctagaattgactggaatgctgctgctggctttcggtaattgacactgggccattcaccttcctcctttgcacctcagtttcctcatctataaaagggagagggttgagctgaatcaactctaagctccttctagttctctaaattctgagagcctcctagtacagccagcagcagccattagccttcagggtagagaggcctcttctgggaagccccagccagcctgggggtcagcccaaggagctcggaatctaagttgccccagttgcttcactttaccagcggtttttcttcattttccctcctccccctgcagctgcttcagcttcggaaaagttctgaagtcatggaaagttggggctgtgctcccagccaggggctaggccggatggcagccaaaacctgagctgggttttgactttatttttagcttttctgactgagacagaggagggaatacattctccggttctggaaggggctcttttttgcaggagacagacacttacattaaacaacttgttctgaggtgtggccagaggcctggactgagcaagtgtgcaggctgggggagcttcctctggcttctcatgtccttcccctgcccctctgagtgtcactctatcctcctccctgcctggtggggggaggtgggggtgactccttttttggactctcctaagcagaacactgcctgggtctcgtcctccagagcttctgcaaatctagccttccctatccctcttcacagtgaattgctgggcctcttggagtttaggacttttgtggtagaagaaaaatgttggcagggctgcttttctcctttccaggatagatttttccttctgcccacgcttggttttccttttttccatctgctgtggtgggctcatgcttaagcactgatgagttacagatggcagctggaaccaggtcctctggatctttccctccgctccctgggtctgctgctttctctcaccctatatttgtgaagcaattgtaacatctagaaagttcttgggttctctggaggtttttaagaaaataggacctttctatttctccagtccactagcaaaaataatcaggggcccagaaaaggtgagggaggtggcagaggcagcgctgttcgactggttatagctaaagctttacccactttgaggagcagggaggcttaaagctggggcccagatggacctggaggcctgggatccacatctggaaccagatgctgaggctatggtagatgggtagggctcagccttctcccagggcacggatgaggcaggagggagggaggcagggacccctctgttcagtgcagatcagggcacccagactgggtcctgagaaaggaaagggtcaatattgtgcctggtcatccttgtctgaggtccctctgagctctaaccagactttccttccccacagtcccacatgtgtaaaagggactaggagaggtgaccagtacctttggggctcagatcgagaagtgctagggacatgtgggccatgagcttagttgtcaggctcctcagagggagggaagcttggccaaagggaagtgagtagagtccagggagaaggctaagtaaggccctgtgtgggaaggggcaggagacaaaggtacccctgtctctttgggaaagaatgggaggagagagagggaaaagcattcatatcacggggtagagctctgcccttggccccaggcacgttcctgagccctgagtcatgggaagggtggagaagcaggaagggggttttcaaggaccttggggaggtgggagcccagccccagaggcaagcagatgcaaaccaacctaatgcaaggatgccctctcctggtaattgcaggcatagcagcgccagcccccatggctgacctcctgggagcctggcactgtctaggcacacagactccttctcttaaatctactctcccctctcttctttagcaataccaagaaggagggtgacctgatagctgctcaggctcggctgaaggacctggaggctctgctgaactccaaggaggccgcactgagcactgctctcagtgagaagcgcacgctggagggcgagctgcatgatctgcggggccaggtggccaaggtgaggccaccctgcagggcccacccatggccccacctaacacatgtacactcactcttctacctaggccctcccccatgtggtgcctggtctgacctgtcacctgatttcagagccattcacctgtcctagagtcattttacccactgaggtcacatcttatcctaatttggctgccaatgggatctaccacagtgaatttaaaataatccaggaggccgggcatggtggttcacgcctgtaatcccagcactttaggaggccgaggtgggccgatcacgaggtcaggagatcgagatcatcctgactaacatggtgaaaccccgtctctactaaaaatacaaaaaattagcctggcatggtggcgggcgcctgtagtcccaactactcgggaggctgaggcaggagaatggcgtgagcctgcgaggcagagcttgcagtgagctgagatcatgccactgcactccagcctgggcaacagagtgagactccgtctcaaaaaaataataataataataataaaaataatccaggccatgtgtggtggctcatgcctgtaatcccagcattttgggaggccaaggaggcaggattgcttgagtccaggagtttgagaccagcctgggcaacacagaccccatctctagaaaataaaaatttaaagaaattagctgggcatggtggtgtgcacctatagtcccagctacttgggaggctgaggcaggaggatggcttgaacctgagaggtcgaggatacagtgagctgtgattgcaccactgcacttcagcctgggtgacagagggaaaccctgtctctacataaataaatacataaaataaaataatccacaagccatttctacttaactttgcaatgaactgtacctgaccctagatccctcccagtttggccctccggtatacaagggcctcctataggcccttgtgatttctctggggaaaaggaggactggagttgatcatttattgaggccatcagaagcggatggctaattacatatgggacatgtgttaataatgctttgtgtatatagagtggcctttactttcaaaacactcttctccaatttatcatgttaaaagctaggaattgggctgggtgcagtggctcacgcctataatcccagcactttgggaggccaaggcgggtggatcatttgaggtcaggagtttgagaccagtctgaccaacatggttaaactccgtctctactaaaaatacaaaattagccaggcgtggtggcacacacctgtagtcccaacaactacttgtgaggctgaggcaggaaaatcatttgaacccaggatcagaggttgtggtgaactgagattgcaccattgcactccagcctgggcaacaagagcaaaactctatctcaaaaaaaataaaaaatagccaggcacggtggctcatgcctgtaatcctagcactttgggaggcagaggtgggcagatcacctgaggttaggagttcgagactagcctggccaacatggtgaaaccccatctctactacaaatacaaaaattagctaggcatggtggcagccacctgtaatcccagctacttgggaggctgaggcaggagaatcgcttgaacccgggaggtggaggttgcagtgagccaagatcgggtcacagcactccagcctaggcaacagagcgagactccatctcaaaaaaacataaataaataaaaataaaaataaataataaataaaagctaagaatcaaagaagcagtttattcctaatttcacagtctcatctgttcatagtggggccaggattagagtcagtggccaagcttccatcctgggttctttcccttcccaggccctaccatcatagtataccagggaaagacctggagaagccagcaggttgaccaccgaaccaaggctgggccaccttcctcctgggtctggtctccagcctcccagttgtacccttcccccagcccttcctggatgcactgatcagcctgtgcttccttgccctgtttttctttataaatagagccatgttctcctctctctctctctcttttttttttttttttttttgagatggagtcttactctgtcacccaggctggagtgcaatggcacgatctcagctcactgcaacctctgtctcccaggttcaagcaattctcctgcctcagcctcccgagtagctgggattacaggtgcccaccaccatgcccagctactttttggatttttagtagagacagggtttcaccatgttggtcaggctggtcttgaactcctgaccttaggtgttctgcccgcctcagcctcccaaagtgctgggattacaggcgtgagccaccacgcctggcaagacgtgttctctctatgttgttgaggctggtcttgaactcctggctgcaagagatcttcctgcctcagcctcccaatgtgctgggattataggcatgagccaccacacttagcccagcctgtgctttcttaaatgaaaatctaagcatacggctgggtgtggtggctcacgcctgtaatcccagcattttgggaggccaaggtgggcagatcacgaggtcaggagatcgagactatcctggccaacatggtgaaaccctgtctctactaaagatacaaaaattagctgggtgtggtggcccatgtctgtagtcccagctactcgggagactgaggcaggagaatggcatgaacctgggaggcagagcttgcagtgagccgagatcgcgccactgctctccagcctaggtgacagagcgagactccatctcaaaaaaaaaataaaaataaaaaaaagaaaatctaagcgtggtgctcccctgctcaaacatcctcaggttcttttcatggcagataagggcatctcttcatgagccagcccctgcctactgacccagccacctctcccatcccttcccaccccgtacttcaggcttcagcagtactgatctttccaaagaccccagaacacacatgccttcatacctctgtgcctgtacatgcttgtttctgcccttgaaatcatgacagtagctctctgtaggccccgctagcctgtcccttgggtcttagcctcttggaggccttcccagagccccccaaaagtaccccaggcatactttggttccttctctcatgtcccctcagtactttgcacatacctcctttatagcagttgctatgttgtgccagagaagggagtcctgtggctggggggcatatatcttttctttttgagacagagtctagctgtgtcacccaggctggagtgcagtagtgcgatctcggctcactgcaacctccacctcctggattcaagcgattcttgtgcctcagcctcctgagtagctgggactacaggcgtgtgccaccatcatgcctggctacttttttgtattagatatatattttctctcttagcacagtacctaccaagagtgagtgagtagatgtcctgacccctgcaggcatccaaggccctccttccctggacctgtttccacatgtgtgaaggggtgcacaggcagcagcccacctctcagcttccttccagttcttgtgttctgtgaccccttttcctcatctctgcctgcttcctcacagcttgaggcagccctaggtgaggccaagaagcaacttcaggatgagatgctgcggcgggtggatgctgagaacaggctgcagaccatgaaggaggaactggacttccagaagaacatctacagtgaggtggggactgtgctttgcaagccagagggctggggctgggtgatgacagacttgggctgggctaggggggaccagctgtgtgcagagctcgccttcctgagtcccttgccctagtggacagggagttgggggtggccagcactcagctcccaggttaaagtggggctggtagtggctcatggagtagggctgggcagggagccccgcccctgggtcttggcctcccaggaactaattctgattttggtttctgtgtccttcctccaacccttccaggagctgcgtgagaccaagcgccgtcatgagacccgactggtggagattgacaatgggaagcagcgtgagtttgagagccggctggcggatgcgctgcaggaactgcgggcccagcatgaggaccaggtggagcagtataagaaggagctggagaagacttattctgccaaggtgcttgctctcgattggttccctcactgcctctgcccttggcagccctacccttacccacgctgggctatgccttctggggatcaggcagatggtggcagggagctcagggtggcccaggacctggggctgtagcagtgatgcccaactcaggcctgtgcctccacccctcccagtcaccacagtcctaaccctttgtcctcccctccagctggacaatgccaggcagtctgctgagaggaacagcaacctggtgggggctgcccacgaggagctgcagcagtcgcgcatccgcatcgacagcctctctgcccagctcagccagctccagaagcaggtgataccccacctcacccctctctccaggggcctagagtctgggccggatgcaggctggaagcccagggttgggggtgggggtgggggtgggaggttcctgaggaggagagggatgaaaagtgtccccacaaccacagagaagggtcgcaggatgtggagtcagatggcctgtgtgctgtttctgtacactcttacctcaccttcacttctcagggctttggttttcccattcgaaaatggaggctgttcttaatctccctaactcagagttgccacaggactctgcaatgtgaggtgttaaaagcatcagtatttttctagttggctgtgctatttgtgacaggagaaaaagtctagcctcagaacgagaggtttcagttagacaaggggaaggacttcccagttgccagccaagactatgtttagagcttgtgatgttcagagctggctctgatgagggctctggggaagctctgattgcagatcctggagagagtagccaggtgtctcctacaccgacccacgtccctccttccccatacttagggcccttgggagctcaccaaaccctcccaccccccttcagctggcagccaaggaggcgaagcttcgagacctggaggactcactggcccgtgagcgggacaccagccggcggctgctggcggaaaaggagcgggagatggccgagatgcgggcaaggatgcagcagcagctggacgagtaccaggagcttctggacatcaagctggccctggacatggagatccacgcctaccgcaagctcttggagggcgaggaggagaggtgggctggggagacgtcggggaggtgctggcagtgtcctctggccggcaactggccttgactagacccccacttggtctccctctccccaggctacgcctgtcccccagccctacctcgcagcgcagccgtggccgtgcttcctctcactcatcccagacacagggtgggggcagcgtcaccaaaaagcgcaaactggagtccactgagagccgcagcagcttctcacagcacgcacgcactagcgggcgcgtggccgtggaggaggtggatgaggagggcaagtttgtccggctgcgcaacaagtccaatgaggtaggctcctgctcagggtctaaggggatacagctgcatcagggagagagtggcaagacagaaggatggcatgtggagagaggaacatccttgccctcagagggtggaccagggtgagcctgtatatctcctccacactctggttccaggcctggctcctggactctttggctgtgagaccttgagcaggttatttaacctctcagagcatcagtttcctcatctgtaaaatggggatgaatactgatccctaagtctttgagttgtcaggaagatgaaagataaggtatccgtgtgcctggtgctgcgtatgtgtccacagatcatggctattatccccgggggaagggcagtgacaggggtgtgtgtagatggaaggagaggcctcaattgcaggcaggcagagggctgggcctttgagcaagatacacccaagagcctgggtgagcctccccgaccttcctcttccctatcttcccggcaggaccagtccatgggcaattggcagatcaagcgccagaatggagatgatcccttgctgacttaccggttcccaccaaagttcaccctgaaggctgggcaggtggtgacggtgagtggcagggcgcttgggactctggggaggccttgggtggcgatgggagcgctggggtaagtgtccttttctcctctccagatctgggctgcaggagctggggccacccacagcccccctaccgacctggtgtggaaggcacagaacacctggggctgcgggaacagcctgcgtacggctctcatcaactccactggggaagtaagtaggcctgggcctggctgcttgctggacgaggctccccctgatggccaacatcggagccagctgcccccaacccaagtttgccaattcagggcccctttctagagctctctgttgcaggctccagacttctccacccagtaggcaaaccaaaagatgcttcctcaacagcacaaggggtggaagttagacagtgaggattgttaaaggcagagccatactcctacccggagagcttgacagtgtccctctggggtggaaatgagttccttagctccatcaccacagaggacagagtaagcagcaggccggacaaagggcaggccacaagaaaagttgcaggtggtcactggggtagacatgctgtacaacccttccctggccctgacccttggacctggttccatgtccccaccaggaagtggccatgcgcaagctggtgcgctcagtgactgtggttgaggacgacgaggatgaggatggagatgacctgctccatcaccaccacgtgagtggtagccgccgctgaggccgagcctgcactggggccacccagccaggcctgggggcagcctctccccagcctccccgtgccaaaaatcttttcattaaagaatgttttggaactttactcgctggcctggcctttcttctctctcctccctataccttgaacagggaacccaggtgtctgggtgccctactctggtaaggaagggagtgggaactttctgatgccatggaatattcctgtgggagcagtggacaagggtctggatttgtcttctgggaaagggaggggaggacagacgtggggcatgcccgccctgcctctctcccccattcttgttgcatgcatatcctctcatttccctcatttttcctgcaagaatgttctctctcattcctgaccgcccctccactccaattaatagtgcatgcctgctgccctacaagcttgctcccgttctctcttcttttcctcttaagctcagagtagctagaacagagtcagagtcactgctctggttctctgtccccaagtcttcctgagccttctccccttttatgtcttccctctcctcctccgggcccctagcctcccaaacccccattgcccgctggctccttgggcacagaaccacaccttcctgcctggcggctgggagcctgcaggagcctggagcctggttgggcctgagtggtcagtcccagactcgccgtcccgcctgagccttgtctcccttcccagggctcccactgcagcagctcgggggaccccgctgagtacaacctgcgctcgcgcaccgtgctgtgcgggacctgcgggcagcctgccgacaaggcatctgccagcggctcaggagcccaggtgggcggacccatctcctctggctcttctgcctccagtgtcacggtcactcgcagctaccgcagtgtggggggcagtgggggtggcagcttcggggacaatctggtcacccgctcctacctcctgggcaactccagcccccgaacccaggtgagttgtctctgctttgtctccaaatcctgcaggcgggtccctggtcatcgaggggtaggacgaggtggccttgcaggggggagagcctgccttctcttccgcagcccgggggagtgggagcctcctccccacagcctgagtcctagacagcccacctctgcatcctgcccctcttgtctgagccccagactggagggcaggggcagggctggagtgtgagggatgggggagatgctacctcccttctaggggccaggggagggagggtctgggtccaggccctgctgctcacacctctctcctctgttttctctcttagagcccccagaactgcagcatcatgtaatctgggacctgccaggcaggggtgggggtggaggcttcctgcgtcctcctcacctcatgcccaccccctgccctgcacgtcatgggagggggcttgaagccaaagaaaaataaccctttggtttttttcttctgtatttttttttctaagagaagttattttctacagtggttttatactgaaggaaaaacacaagcaaaaaaaaaaaaaagcatctatctcatctatctcaatcctaatttctcctcccttccttttccctgcttccaggaaactccacatctgccttaaaaccaaagagggcttcctctagaagccaagggaaaggggtgcttttatagaggctagcttctgcttttctgccctggctgctgcccccaccccggggaccctgtgacatggtgcctgagaggcaggcatagaggcttctccgccagcctcctctggacggcaggctcactgccaggccagcctccgagagggagagagagagagagaggacagcttgagccgggcccctgggcttggcctgctgtgattccactacacctggctgaggttcctctgcctgccccgcccccagtccccacccctgcccccagccccggggtgagtccattctcccaggtaccagctgcgcttgcttttctgtattttatttagacaagagatgggaatgaggtgggaggtggaagaagggagaagaaaggtgagtttgagctgccttccctagctttagaccctgggtgggctctgtgcagtcactggaggttgaagccaagtggggtgctgggaggagggagagggaggtcactggaaaggggagagcctgctggcacccaccgtggaggaggaaggcaagagggggtggaggggtgtggcagtggttttggcaaacgctaaagagcccttgcctccccatttcccatctgcaccccttctctcctccccaaatcaatacactagttgtttctacccctggc

SEQ ID NO: 195 - DNA, 490 bp, Homo sapiens
tcatccgggtgcatccctagtgctcaccatgctgcccaggcaccctcactgagatgagaactttccttgttcccctcccctaataaccaaagttcctgccttaatcccactccagtccctcatccaccccgaggccaggcttcagaacccagaactgagggcctgtccagccctgctttccttgtgtttgagggaagccctgatatcttggagctgtacaaggtagcaacataatttgatttccctggttgctcatcggaggataagctgtgggaggcagttgggcagggcatgcaggcagatgggacccaggcctcaatgctgtcacctcttagagaggataaggtgggacgggcatggtggctcacatctgtaatcccagaactttgggaagctgaggcaggcagattacctgaggtcgggagtttgagaccagtttggccaacatggtgaaaccccatctctactaaaaataaaaataaaaaaaaaa

SEQ ID NO: 196 - DNA, 591 bp, Homo sapiens
ggagaagggcccctgaggtcatgctggacgctcctgattccaccataggctgagaccccacagtgcctttagggaagggaagttaagcggaaggaggtttgaggaaggggtccctgcttgggttggcagtttccaagaaggaaacccttcctctcctaggcctcagcaaagaccctgaggccccgcagatatggggtcttagatgtcagcgagggagtccgtgtgtcccaaaatgaggactcccacctgcagttcctgggtcgggcaccttggggcgccagagccccaccacggtggtgcctgcacatcctgggtaggggtccttcgctactcagctgaaccctggtgagctggctgcatgggcactgtgggctggggaacaccaggggcagcaggcaacgttcctagctcttgaggaggagggctgagggcatagggccgcacacaaacactgccccacaagctggcagcacggcgggggcggcagccggggactcagcagttaaggtgtccacacacgtggtcacctcacatgatgctcacagcacaagtcagcactcagcagccacatttcattatgtaaaaaaaaaa

SEQ ID NO: 197 - DNA, 591 bp, Homo sapiens; identical to SEQ ID NO: 196

SEQ ID NO: 198 - DNA, 490 bp, Homo sapiens; identical to SEQ ID NO: 195

SEQ ID NO: 199 - DNA, 729 bp, Homo sapiens
aaaaaaaaaaaaaaaaaactagcatagaaaatattagagtattggccatagtgggggtaagttctgttttgagaaactgtgtgatcattactaggtcataacgtaaattgttttctcaactgtgactcctggccaaaaaggtgaaagcaactgctataaactaagctacagatcctcgggattataccaaaggatgcagaattggtttgtacatttgcatttcctcaatgaactgatactaaactttttactactactatgtgtttacagggagaaggtaaataaaaactttggcattaaaaaggaatcttaatactcaaaaaggacggtataagaatttcaatggcagacagttctttctgactctccttttatctgtgtctgctacactgcagaccattactcccacccctaatatgttttctcctcctgttaatgagacagatttgccacagtcaagtgtaccttgtcttggggattaactgccttgctacttcatagggtgacttttcagatgtcttatcacaaccattttaatttcaaagtctgttcccataggactaagatatgttccttattcccaggttattttgggtgaacttcaccatcactgtcatgttctaaccacatttcacttagaagactggcccctttaggatctggcccatacttacatatctaatcctatttcttgacactctccaacatgaactcaattatttgtacttg

SEQ ID NO: 200 - DNA, 531 bp, Homo sapiens
aataaacatttttcaatgaatgaatgaatgtttgggtctgctgtgacagaagcctttcagttctatttaagtctgggcataaagtttcatgtgagtctattcaagcctttctactatgcaagacaaaagagaattctactacagtaatgcaataatatgcttttaactaatcaggcaacatcaccctttacaagcatcaggggtagtacttgtgattctaagcaacagcctgatttttgagtggaaatggtaaataaccagtaaggcatggaaacagcatattttgctgtatgaactcaaatttacttatatcattcaaagatattttcaatccttcgattggtgaactttttccttcggttatattattctctgaaattcaggttctctgttaattacattagcatagagtatgtcagagtgatttctcacctacattagtatgtaagtctcatcactaccaaaatttgaacagattccaagtagataatactgcttctgaaaagtttatttctgattttcataaaatgt

SEQ ID NO: 201 - DNA, 463 bp, Homo sapiens
ttcttaggtgggccatgatggctaggtgggctggattgggtattgagtttttcccaggtcagttaggctttgataaagccccagcagggtagcttctagttaaaatagcttctcctgaagggagaccttgttgagaactgagttctctaacatatttcaaaatgttcttttttccctcccactgctggaaacggaaggggatttttctcccaatatttactgtaagaactaggtcaagcttctaaagttaaaattcacaagagtgtgggggttccttctatgactggagtttttaactttcagacttgtccatacctaacttctagcagttacattcaggttttcctaccccagcactggttcccatccatgggattttttgctctgatacatcatcattctctgtattggcctatctgtccaattttgggggcagcagtttgctttgtgacctcacttctct

SEQ ID NO: 202 - DNA, 3253 bp, Homo sapiens
ggcccactatttgaaaacctcacattcggagcaggccactttatatgcgggagggatcccaagctaactgaccaacagaaaagatgctaaaaaaatgtgtcctatcatgtgcctgctccaactgatgggtaatgtctgcctttaagccccagaatggattctccaggcacagtgtggaagagtgctgtggttgattagcaatgtctgccttgggtgaggaaaggggaacactcctcaagtgcctcctactgtcatctccattcagcctagcaccacatccccatgtagaagtgttgtcttctactgcttgccacgtacaagtgtgaaatgccaaggtgagactcgtacacttggggatttgcaatggtttttacccctcatgaaggtcagaggtggactatttgtacacatacacacatgcacaccctctcacgtcctccagaggctgaaagactatcagcatcttggtaactgccatgcatgagcagcaaggacagccttccataatccatgccccatttcctctggaagcctggaaacttttcatttcctgttccttgctaattaacatctaaacatgcttctcatttccagccattgctgatgcttctcagttgaagtttgagccacatccctcttacagctagtgaatgagttggtagcagctactgtatataataataataatagttttaataataggggagggtgggatggggtgtgggtaagttttgccttttgttttgtttttgatgccgtatatagtgaaggggtgaggatattctaaacaaacaaaaattgaataatttattcacagaaactattaagattgtattgtaaagctcacagcaagctcagtgggcagcagctgcaacatctcaccggggaaattattttatttaacgtgagtgagatgtgggccggagaaggtagctgaagctatttataaaacgttgtgtaccttcttccgagctctctcccctttgtgaagggcgcagcaactatacccttgatggatggagatttacgcaatgtgttttactgggtagagtgacagaccttggctgtccctggaattgagaatctggaccttatttccaggcagagaacactgtcctcagaaatgggacttctgataatgaaacaggttgtccaacattttctaatacgcattctacagaacacaggttccaggaggcatcaggttggtgtgatgcagactaagggttttgtggtcaaatatccttaagaaacaaagttaagtcagtttcctttctgcaaggacttttcagccttcaatgtgtgctgtgcatggtgaatccccaaaaataatccttgagtctgtagcatttcctgaacttacatgaccaggatactctattttgcagatcaccccacagagctagggttccaccgagtatactttgcttaggttgacttagcatatctgaggtcttcaaggataaaaactgccaccccaacacccttccattaaaaaaaaaatacaaaatagcaccacagtctccatctggtttatagcaacagaggtactttatttaatgaagcaatggttctaatcctggatactgccacggactacaattctatccctcccagagggagtggaggaagtcttgggtggtgtggacagaaggaagagaggagagggtgagtggggtatagggcccagggtggctccctactcctcaggctcaaaaggatgctcagtgggaacagatgatctcttgatgagtgcttcttcagtttcatagtttggaatcgttcactgtgtgctttttggggggttttcaatggaaattcacgttgctttgcatttctgtgtccgtctttggtcagttgtgcaagcctgctcactgtcatgtgaagatggcctttcatctggcttctctctcttaagtgagaaagattgtccttcaggggacatgacatcaataggtttctggaatgagggactctttctccccgtgttttgctttgtgttcacattttcttttctaatggcattgaaactttaaaaaaaatggattcaactgtttttgcagaatgtagaaagtattctgtgtccttggttaaagaaatccacttgtgaagtgtgcctggaaaatgaaagtttgtgttttttaaagaggaatatttgaaactgctttctatgcatgcttagctggagaaaagtacaggcaggcgtcccatctcccagccacttctcaaaggtgctgctgtgttttaaagaccaggtacagccagggcagtatttgcaaggacattcctgcttactttatccctttggttggaaagctctagatgattcccgcagctcctccagaccccgcctccctgccctccccagctggtctgggaagaggtggtctgctgacctgtggtatctcagaggggacgttcctcctcctccctgtgcaccaggtgggctgcaccctcctgcctattcaggatgtggatgccacaggagagcagcaggcagtggaaacttcagttgcactggttctcctggtggcaaaggcatgaagcacaggggtcgattaatccaggctactagaaagctccagagcaaagtgtgcgggtcccacaaatgcttggctggtggggtctggatcagtgctgagatagagttggcagaagaagcagaggcactctgcttgctttcctagccagtcctcccctacacacacacacacacacacacacacacacacacacaatctcagctgcgccattctgtgcaatcccagtgaccaaatcccttccttgcccacctctatgtcagcaggactgaccacatcactcccccgagttcccaccaccagcatttcctccaaccttttccatcacaaccagttagaaccctacaggcaacaaggccttctagaatccgcttaacccttggctgataacaggcaaatttcagtctgctacactttgttaggtccagaaggagctgcccatactactttcttatgagcatgctcagtatggcatatggacatgtaatgtcacatctttgtggagtgtgattttcttttttcacatatttgtatgcagtagagagcctgttgtagaaaacgctccctgtatcttgctgtactgttaaagaaagctgaattccacattgccaacaaaagcgtgaaaatgttcatgaaccttcctccaggaaaagccattcaagcctgattatttttctaagtaacttcaattaaattgaagaaaaaagaagctg

SEQ ID NO: 203 - DNA, 3606 bp, Homo sapiens
taacccaaggagaaagttggttgtaacaatttttcaccagaattagcaatctgatagaataggcttttttaacaggaattttaaactggcggtgccagttgcagtgaaggtgaagtggctattgctttatattcgacaaatatttattgagcatctactatatactaggccctgaagatagagcgttgaacaaacccaatagtcttggccctcaaaaagctttatgtgacatagagcatccagctcgacaattagcaaacccctgatattattcatggacttgacatgaggtttggactattcatgagcaacagcagaaggtccatgacccctacaaatttacatttttctatggcccatatttgaaaacctcacattcggagcaggccactttatattcgtgagtgatcccaagctcactgaccaacagaaaagatgctaaaaaaatgtgtcctatcatgtgcctgctccaactgatgggtaatgtctgcctttaagccccagaatggattctccaggcacagtgtggaagagtgctgtggttgattagcaatgtctgccttgggtgaggaaaggggaacactcctcaagtgcctcctactgtcatctccattcagcctagcaccacatccccatgtagaagtgttgtcttctactgcttgccacgtacaagtgtgaaatgccaaggtgagactcgtacacttggggatttgcaatggtttttacccctcatgaaggtcagaggtggactatttgtacacatacacacatgcacaccctctcacgtcctccagaggctgaaagactatcagcatcttggtaactgccatgcatgagcagcaaggacagccttccataatccatgccccatttcctctggaagcctggaaacttttcatttcctgttccttgctaattaacatctaaacatgcttctcatttccagccattgctgatgcttctcagttgaagtttgagccacatccctcttacagctagtgaatgagttggtagcagctactgtatataataataataatagttttaataataggggagggtgggatggggtgtgggtaagttttgccttttgttttgtttttgatgccgtatatagtgaaggggtgaggatattctaaacaaacaaaaattgaataatttattcacagaaactattaagattgtattgtaaagctcacagcaagctcagtgggcagcagctgcaacatctcaccggggaaattattttatttaacgtgagtgagatgtgggccggagaaggtagctgaagctatttataaaacgttgtgtaccttcttccgagctctctcccctttgtgaagggcgcagcaactatacccttgatggatggagatttacgcaatgtgttttactgggtagagtgacagaccttggctgtccctggaattgagaatctggaccttatttccaggcagagaacactgtcctcagaaatgggacttctgataatgaaacaggttgtccaacattttctaatacgcattctacagaacacaggttccaggaggcatcaggttggtgtgatgcagactaagggttttgtggtcaaatatccttaagaaacaaagttaagtcagtttcctttctgcaaggacttttcagccttcaatgtgtgctgtgcatggtgaatccccaaaaataatccttgagtctgtagcatttcctgaacttacatgaccaggatactctattttgcagatcaccccacagagctagggttccaccgagtatactttgcttaggttgacttagcatatctgaggtcttcaaggataaaaactgccaccccaacacccttccattaaaaaaaaaatacaaaatagcaccacagtctccatctggtttatagcaacagaggtactttatttaatgaagcaatggttctaatcctggatactgccacggactacaattctatccctcccagagggagtggaggaagtcttgggtggtgtggacagaaggaagagaggagagggtgagtggggtatagggcccagggtggctccctactcctcaggctcaaaaggatgctcagtgggaacagatgatctcttgatgagtgcttcttcagtttcatagtttggaatcgttcactgtgtgctttttggggggttttcaatggaaattcacgttgctttgcatttctgtgtccgtctttggtcagttgtgcaagcctgctcactgtcatgtgaagatggcctttcatctggcttctctctcttaagtgagaaagattgtccttcaggggacatgacatcaataggtttctggaatgagggactctttctccccgtgttttgctttgtgttcacattttcttttctaatggcattgaaactttaaaaaaaatggattcaactgtttttgcagaatgtagaaagtattctgtgtccttggttaaagaaatccacttgtgaagtgtgcctggaaaatgaaagtttgtgttttttaaagaggaatatttgaaactgctttctatgcatgcttagctggagaaaagtacaggcaggcgtcccatctcccagccacttctcaaaggtgctgctgtgttttaaagaccaggtacagccagggcagtatttgcaaggacattcctgcttactttatccctttggttggaaagctctagatgattcccgcagctcctccagaccccgcctccctgccctccccagctggtctgggaagaggtggtctgctgacctgtggtatctcagaggggacgttcctcctcctccctgtgcaccaggtgggctgcaccctcctgcctattcaggatgtggatgccacaggagagcagcaggcagtggaaacttcagttgcactggttctcctggtggcaaaggcatgaagcacaggggtcgattaatccaggctactagaaagctccagagcaaagtgtgcgggtcccacaaatgcttggctggtggggtctggatcagtgctgagatagagttggcagaagaagcagaggcactctgcttgctttcctagccagtcctcccctacacacacacacacacacacacacacacacacacacaatctcagctgcgccattctgtgcaatcccagtgaccaaatcccttccttgcccacctctatgtcagcaggactgaccacatcactcccccgagttcccaccaccagcatttcctccaacctttttccatcacaaccagttagaaccctacaggcaacaaggccttctagaatccgcttaacccttggctgataacaggcaaatttcagtctgctacactttgttaggtccagaaggagctgcccatactactttcttatgagcatgctcagtatggcatatggacatgtaatgtcacatctttgtggagtgtgattttcttttttcacatatttgtatgcagtagagagcctgttgtagaaaacgctccctgtatcttgctgtactgttaaagaaagctgaattccacattgccaacaaaagcgtgaaaatgttcatgaaccttcctccaggaaaagccattcaagcctgattatttttctaagtaacttcaattaaattgaagaaaaaagaagctg

SEQ ID NO: 204 - DNA, 155 bp, Homo sapiens
agtagctgggactacaggcacccgccaccatacccagctaatttttgtatttttagtagagacagggtttcaccatgttggccaggatggtctcgatctcttgaccttgtgatccgcctgcctcggcctcccaaagtgctgggattacaggtgtg

SEQ ID NO: 205 - DNA, 1146 bp, Homo sapiens
ctgtcctgcaccagatgcggcgggaccaggtgacagacacgtgccgagccaacagcgccacaagccgtaagcggagggtgctgaccccaacgacctgaagcacttggtggtggatgaggaccacgagctcatctactgctacgtgcccaaggtggcctgcaccaactggaagcggctcatgatggtcctgaccgggcgggggaagtacaccgaccccatggagatcccggccaacgacgcacacgtctccgccaacctgaagaccctgaaccagtacagcatcccagaaatcaaccaccgcttgaaaagctacatgaagttcctgtttgtccgggagcccttcgagaggctagtgtccgcctaccgcaacaagttcacccagaagtacaacatctccttccacaagcggtacggcaccaagatcatcaaacgccagcggaagaacgccacccaggaggccctgcgcaaaggggacgatgtcaaattcgaggagtttgtggcctatctcatcgacccacacacccagcgggaggagcctttcaacgaacactggcaaaccgtctactcactctgccatccctgccacatccactatgacctcgtgggcaagtacgagacactggaagaggattctaattacgtcctgcagctggcaggagtgggcagctacctgaagttccccacctatgcaaagtctacgagaactactgatgaaatgaccacagaattcttccagaacatcagctcagagcaccaaacgcagctgtacgaagtctacaaactcgattttttaatgttcaattactcagtgccaagctacctgaaattggaataaagggggtggggagagggagagaatcatgctttttaatttaagatttttatttgtcaaaagaattatatggatattgggttattttgtaaattaatatttctttggggatgatgctgcgagcagcatagtgagaattatttaaaatccttcgtagggaaggacagctgtctttgcaggggaaataggatgggtcgtccttgtctgtagaagtgaatactgcaacactgtctcaaaggtttcttgtgttctggtgaattccatgaattgtgcattccataaattctaattaatattatttatagttatttaaa

SEQ ID NO: 206 - DNA, 155 bp, Homo sapiens; identical to SEQ ID NO: 204

SEQ ID NO: 207 - DNA, 393 bp, Homo sapiens
tttttcttgcctcccagtgtgacttgtaatttttaattgaaagctggatatgatgtatttggcaatgggaagtgagggaaatatgtttttagtgtgagggtttatgttaatctttctcagagttgggctgtttaatgttttgctgtggtctgaatgttccttaaaacttgtgtgttgaaacttaattattattgtcatggtattaagaggtggggcctttgggaagtgattaagacatgaaggctccacattcatgagtggattcatgctttttaaaaggactggaggaaagtagtgtaggctatttttttgcccttgtgccttccaccatgtgaagatatagcattagcccctcctgccatgtaaagactcaggaagaaggccctcagctgg

SEQ ID NO: 208 - DNA, 7386 bp, Homo sapiens
ggattaaggccctaataaaagaggtgtcatgcagccattcagttagcttgcccttctgtcttcttccatgtgaggatgcagcaagaaggccctcaccagaccaaaggccagtgccttgatctcggacttcccagcctccagaatggtgagaaatatatttctgttcctcataaattacccagtctcaggcattttgttgtagcagcacaaatggactgagacaaggggtacgcagtgggcctgtgccaccttggcccatgggaggcaaaccaggaagccttgtctcctcaccactcagaatgaggagaacatgtgaaaggagaaaggggttggggctgggtagggtcatttgctgacttaagacctctaatgcgttgtctctggagagttgaaacatcttgctaaagacctcatagtcagtctttgctgcaacacagatggaccaagcctgtctgtattgcagcaaagagtgaggagatattccagcaaaggcagcatcctgtatgctgattactggggaagcacaagaaaggggagctgtcagaggctatagagctgcatctgtacctggggaaagtgagagagaaaattccacgggttgtaagtgttgtctggagcctcgtagggggtggccagccccactacccacctgataccaggaaccctacctccccacctctgacccagctctccagtgcccaggagaattccctgctttgtaaaatgaattctcctggacactggagatctgggtcagagctggagagatagggttcctggcatcaggatcttgaatctggattttcccaaaatatgtttcaacaaagctttctcttgtgatgtatgcctcaaatatgtttgggaaacctggcatactctgttccccatcaaggagacccacatcgcacattagtatattaaagactctgagaagttctgtaaaattaaaacctgtttaattttcttttcttttcttttttttttttttgagacagagtctcactgtcatccagcctggagtacaatggcacaatcttggcttactgcaacctctgtctcctgggttcaaacgattctctagccttagcctcccaagtagctgggactagaggcacatgccaccatgcccagctaatttttgtatttttagtagagacatgtttcaccatgttggccaggctggtgtttaattttctttagccttcatttcccattttttcacattaacttcccttaatatcccatggatctaatgacgccattagctgggaatgctgcattgatggttagaaaagatgtggataatgcactggtttctgcccagtcctttacataattgggacccactggtaggtgtgtctgtgagtccccagccctctcgctgccccacctcctagcttctattcctcacaagccagctcttgggttccctcacctcttggtcacactcatggaagagttccaggttgtctgtgtcctccataaggcagttccctaggtgtgtctgattggggctgatttgggaaggactgttctccttttctttggatgctgtccagggatttgtgttcccttttttaagtagcactatccacgtccttacataacgagcacaaaggtgaaggtatttccagccatggacaaaagaaataagatggcagcaaacagttgccttgttagtgaacttaaaagagacctttcttttaggtcatctttgctttgaaccagaccctcctgcagcaggaaagcctgcgagcaggcagtcttcagatcccctacacgacggaggatctcatcaaacactataactgcggggacctcagctccgtcatcctcagccatgacagctcccaggtgagcaccctttccccctgccaagctcagcacacatttaattataggaataaaaacattacctggcaacatgtacatcctgtgtacaaaggattgaggtcatgagggctctagaaataaagtgggcagatttagatgtcattgaatgaggcactacagcgaatgaaagctttacaaaccttgtaagaacagagaggggcattgatgagggttaattccagtattccagccaaaggatgaagcttcaaaggatttaacagtaggccacatgaaccagccttgaggaagggaagggttctgagtctgatggcctcctggctgacttaggtcatacttttgcaaaatgatggggcagaactttgactgcagcttcagtggcctctaggaacatgtgaacatgatatagctgtgtattcacagaatgcttacaggcttagggcatcagagctgggaaggctgctagcatttgcagacgtggatcattgcatcctgtggtattgcaggatgagtgtggctgagctggtggattgagtgtttgcccagctcaggccttacctgtgggccattgagtggaaggaagtagctgctcagcctcagaagatcatggtctccttccaggagggaagtggtacggatctttgttatgcttttatcaacaggcttcccatgggacaagccatggtgccttcgcctcctctctaggactacatgcaaatagcaaacaccagctaaacttctgaggtaggggagtgtgttgtttcccccacccaggactggtgtccacatgcatgaagacactggagaggggagacaggagctagtgggtgtgggtgatgctgtacaggtctatgttaaatctggggacccaaccataaggagacatgtgtgaacatgagagctgaaggaggaatagcagcaatggggagaaggacagtacaggctgagtgcagcatcagcccagaaaggtgacatttcattaatgacagaagcctcaaaagatgtaaggagcatccccaaaaatctagaggaaaaaaaagtcaaattgagacaaagtgaagcaggaggaaagggagaacaagaaacacattaaagaaggaaaaatagagttggtggtggtgataaatcttacctgcactcttgctgagggtagggaaggggggagaaaagtcaagatcaattgggaaattgacatttgaagcagcagaaaaaagttaatgtgggcggaggatttggtcattacgtgggcaaatggtgaggctgatggagcagataatacagatgtcttatgcatttttctcctgtggctttcccatatctgttctgcccacagggcccctacaggaggtcagggaatgtgctgtcactgtgagtgagggccaggctggccagcagggagtggtgcaggctttgggtgatgtttggaatttagaaggtggagcaggatgtcagagggaggtcaccctgtgtatctgacgctgcctctgtagagaggctggtagagaggggggctctgctgaagagaagagattttgggaaatgggcaggggatcttacataaatgacatgattaaaaaaaaagatgacagagtagaagatgaaggctgtcgatttgaaaatgaaagaatatcatttcgaggccgtcgcaaaaggagatctgttatccataagatggaagttaatgctgtcacagagtctgaggactttggaaagctttttgagaggctactggaagcagcagcagcaggcagggtagatactgaccaagataatgggtaacattgttaagtccctgggtggaggagagagcatgcacccagggggaggagtgggaggctgaggtttgggaagccagacagctgagggggtggggagaaaacacagagtgccagccttacctgtagctcctgggctgcaagaaccacgctgattgtcacaattttgatgcactttcatcctgttattagccaaaatactgaaactggctaacatgtataccagaatcagtgaaatatttgccaggagggcaaagaacattggggaaagcaagagagagaaataggaagtggagaaataatgaaaatgtaaagtagaggatttataaaacatttaagtgtttatacaaatttcatgttttcggtaatagaatctaaaatatgtaactatataagactatttttataagaaaagcatgtatgaatcacacaagttaaaactatggatgtactgtgcaaagacagtgtcctttttttttttttataaacacacggcatcagacagagccatttaactaaaacagaagtgcagttgtaaatagtgtaagagttcattcaatgcacttcacttaatatttttttcactttggttacagggaatgtgatagagtgggaaacatagcagacaggaaactccaagaatggtgtcactcttctcttgacaacgtcttgaccatctaggttgggggatttgatgctccaatgaagtaactttgttaataactctgttgccccttatttttttttctctttattttggtggaggttcccaattttattaatgccacgctaccacctcaggagcgcatcactgctcaggagattgacagctacttacgccgggagctgatctacaagcggaatgagagaatagggaagcgggtgaaggcccttttggaggagttccctgacaaaggcttcttctttgcctttggagctggtgagtagtgggtcacctctgattagcctctgaaatctgaggcttctcccaagaagggaatgttgaggtgagcccctgcttagggcctgtgttagtcatgaagcgagatgaagggagtgacaccttccttgacttatttcagttgcagagtggctccagctggggatggagcatccagcatggttgaaatgttgctggatgagctggtgcatgtgacatcacccatagctctctccacacataagccagctgggaaaacatttttgtcctctgaatttcatacttaatcccaacttctttctggtacttttcactttgtaaactttcactacaaatatgtttgtctttactcttctacctgacaatgagcctcccaagtccaaggcctggggctgatacatcagctgttattgactgttagcagcacacatggagacagaataggacaattattttcttttgtgggcttcttgaaataaattctctcccccggagtgactctgacacagaattctttgcagcctcaggaaatgaggatagaaatgccagaggctggacagtatgcagaaagatcatttgctgggctgggctttgtttcatatttttctgctaacttcataaacttaaacaagtcatgtcactcagtttctttaccagtaagatagggggttggagagaagcaattctgaaatggtggagtgagggcctccaaaaacctgttcttccatagcagcaataagaacactggaaaaaatggtcaaaatcaacttttccacagctctggaaattaattaaaggcttgcaacaatcctagaagtgtttatttaagaaaactggatgaattttgatagaagcagtgggctttgtggcattttaacttgttctgtttttatctcccttttcccagcttcacagtagccttgaaaatcaggagccttgaactacagtagctgtgaaaactgtttgcctaatggttactggaggggacagaatgggttcaaagttcctccaaagctccatccttaaagaatcatcactatttgacatgtccaatagttccctgaaatttccattcccaagcttgtcttcatttgacctgactcagagcttgctctgtgtgaatagccctattcttagggtgtgtgttgaaaacaatcagtagcagctgtttaacatcatagttgctggaaatagcaatattaattgaagcttacaaggggctgcccaaaaaacttaaaagcaaaatcccatagggggtatagaaaagctctaaaatattcctagagagtcacatgcatgagaagagctgtgcacatgcccaggaaagacctgagaaggtcctaatctctcacctctggctgatcttgaggctctgtgtaagcagagtgtgaaagctaaggcaaagtcataaattgcctgttgaagcatcaaatacatgcccccaaactcacacagcccctctgcaaaggttgggaaacttgcaaggaatttaaggaaatctctgttcagtcattagccagccactaaactaactgagcagatccttcagtgatcacacacaacaaagaatacagactttacagacttagtcctagaaaatcactacacaaacagcaacaacaatgcacctgggactaagggagaggagatgagttccagagttggtatattatttaaatgtctagttttcaataaaaacaattataagacacagagcaaaactagaaagtatggcccatacccagggaaaaacaagcaaccaatagaagctgtccttgaggaagttaatatcttggacttactagaaaatgactttaacactagttattataaatatgttcaaaaaactaaaagaggccaggtgcggaggctcacgcctataatcccagcactttgggaggctgaagcaggtgggtcacctgaggtcaggagtttgagaccagcctgaccaatatggcaaaaccctatctctactaataatacaaaaattagccaggcgttgtggcgcacacctgtaatcccagctacttgggaggctgaagcaggagaactgcttgaaactgggaggaagaggttgcagtaagctgagatcacaccactgtactccagcctgggccacaagagtgaaactccatctccaaaaaaaaaaaaaaaaaaaaaaaccctaaaattaaccatatctaaagaattaaaggaaagtttgagaacaatatctcaccaatacagaatatcaataaaaatataaaaattattttaaaagaaccaaataggaattctggaatttaaagtgtaggaactgaaatgaaaaattcactacgggggctgaacagtagatttgaactggcagaagaagaatcaacatacatgaagataggttgattgagatgattcagtatgagaaagagaaaggaaaaggaatgaagaaaaatgaatagatcttcagatacctgtgagacaccctcaagtgtgccaatgtatacctaacgggagtcccagaagacaggagagaaaaaaagaaagaaataaaaagaatatttgaatttaaaattgcttgaaaatgtctcaaatttgatgaaaaatattactctgcacattcaacccatgaactataagttgtataaaatcaaaaagtttcacaccaaggcgtgtcatagccaaactgtcaaaagccaaagacacagaatcttgaaagcagtgagagcaaagcagacaagggatccccaataggattaacagcagatttctcatcagaagccatgcaagccagaaggctatgggagacatactcaaaatgctgaaataaaagactgtcaacaaaca

SEQ ID NO: 209 - DNA, 352 bp, Homo sapiens
tgaacatgccactgcactccagcctgtgtgacagagtaagactctctgtattaaaaaaaaaaaaggctctcactgggcactgaatgcctatgcctagattttggacttcccagcctctagaactgtgagaaataaatttctattgcttataaatgacccagtctgtggtattttgtaacagcaacacagactaaggcatgtttgctgtaactctaggtcccagaggcttcagtttcctctagtgacctctagtttttcctctagtattttttgtcttgtgctttcttaagaaccttcttaaatagagtctgagtcttgctgcactttcacatataatccactgttattttac

SEQ ID NO: 210 - DNA, 32199 bp, Homo sapiens
tacattttgtttcatacataatgttggttactgcttagtgggtagaagttcaagtaagttgtcaagtttcatgcatggtaggttatacgtgctatacaacttgcagtggcaacagtcgtttgtcaggtgttggtgatgacccttaaatatttgagatgttgtgacctgatgtatctttagtttcaaaccactgctttcctccatgtggttcagttggagtatgtgctctactttagtcatgtttaaagtttatctgcagaaactcaccttagaattgtattttttcaaacttttgacagcttacattttctatagcaacacagcacacgcacgctaacatttacttgaaactatgcactcatgttttctacttcatttttttttatgctggttacctcagtgagttgattttctgcatttgatttcatgacccttccccaaataaaattcactgaagtctgaaaaactcctagagtatcttcagacaaaatatatcaaattactgggcagagtttccagaaaggaagtaaaccgttttaaaactcatctgcagccaggtgcagtggctcacgcctgtaatcccagcaatttgggaggccgaggcgggtggatcacctgaggtcaggagtggagactagcctgaccaacatggtgaaactgtctctactaaaaaatacaaaaattaggccaggtgtggtggctcacgcctgtaatcccagcactttgggaggccaaggcaggcagatcacctgaggttaggagttcgagaccagcctgaccaacatggagaaaccccctctctcctaaaaatacaaaattatccggctgtggtggcgcatgcctgtaattccagctactcaggaggctgaggcaggagaatcgcttgaacccgggagtgagccgaccgagattgtgccattgcactccagcctgggcaacaagagcaaaactccatctcagaaagaaataaaaaaaagctgggcatggtggccagcacctgtaatcccagctactcgggaggctgaggcaggagaatcgcttgaacctgggaggcggaggttgcagtgagctgagatcacgccattgcactctagcctgggcaacagagcgagactctgtctcaaaaaaaacacttcacctgtttatccttatgtctgagaataatatgaaggaacagaaaagcctaaaaagggcttgtgcctgaggaatctggtttcacccctcctcccaaacaataaaatgttatcaagacttaaaaggctaaggcaggaggattgcttgagcccaggagtttgaggcaagccagggcaatatagcaagacacccacgctaaaaataaaaataaatgtcaagacttaatttcctatgaactgcagtttttctcttctgaaaatggtaattctataatataaacatcatagaaattcattttctaaaccttcatgtgtgattacaacagagtagatgtggctttaagaacatactataccatatatgtgaggttttccttaaaatttagcccagaactatggacactttggttattataaagttgtattataaagaactctaccacactagctcttctgaaattttatcaggggctgtgacacttggacctactgtcttttgagttatatagttctcctagactcaaaatgttagggcaaaaagtgttcttaacactgagttgggctcaatggctcacgcctaaatcccagcactttgggaggctaaagtgggaggatcacttgaagccaggagttccagaccagcctggccaaaaaaaaaatttaattagctgggcatggtgtcacgcacctgtgatcccagctgaggtcgggggagactgcttgagcctgggaggtcaaggctgcagtgagctgtgattgcaccactgcactgcagcctgggcggcagagcaagaccctgtttcagagaaaaaaaaaaactggtccaactcctctcctatcagttgctgaatatgcagccccaaaggatatgactcgctaggcttatgtagccaggacccaagatctgtaacatgcattttacataggtatatattacagatatataattttgtcacgatggctgtaacgagatttggatagaaatgggtattgactccatgacagtgagttcatagccagaaatggttgttgtgttaggcatgctccacttgtccctactgttgtcatcaccaatctgggaagacactgctagtgtaaacaaaaggcacctgctgaggcaggtccacacgccacctcagggagctcccatttccctgacactgcacgttggtgtttcccaccattgctcctggtgaaatggttgcagcaggcgacagggtcaacctcttctataaaatagttctaggggcaattggaaccaagatgacttctgtatcttcctataacatgcatataacagctgttcttctgcaacacctctcatctcaaactttattagacaactaattgtggtatttacattaaggttccctaggaaactaacaaagttacaaacgtgtgtgctaaaatttaacactggacctctgttgccatttgaggccataccctaaaacttaactttgaatgtacttgtagctgctcatcaggaagagaggaacagatactgtaaatgtgtttttttgctttggcatatttttgacgggaggggtggcactgcgtctgctggaatatgtttacaatctggtctatctggaagtttttctataaaaatcaaactgggatcccagggtcactacacttagcttaggtccaatggtctagaaataacaactgattcaatttagagagtatttcattcaggccaggcctagttctaagagctttacctaactaactcatttaacctttttaatccattctacaaattaggacattaaggtacagatcaaagttatttgcccaaactcatagcaagcaaatggtagagctcctagtcagatccagcaagtctgactccaacagcctgagttctggaagcattacaccagcttttcaaatgtcagattgagacaacttagtaggctgtaaaatcagtttaggaggtctcaactggccattcttctttagtatgtagaataaaatgaaaatagtgtgcatcatggtaaatactgttttgtgaacttttggtttgatatatgtgtacacaagtatatttatatgctaggtaatatgaaattcttaaactgtgatcaaaaaggctgacaccaagctgtgttgactcagatcatctgactccgcctagaacaagacagcaggatctgaatctcaggtatgagcttggcaaagcacctaacccatctatagctcaacttcttcacctataaagtggaaataataatgtgaagatttgataaatttacacattaagtgctaacaacagtgcctggcccatagtaagttttcattattatttcctgtaactatatattgccatcatcaatcaaatgttgtacttaaaatccttttgggactcctcccacgttaagtattttcccatatgctatacagcgggtggaggtccattcctttgagaaggcttggaacaattccctccatggcccacatgtggaaaagaggattccaatatggcctccttattctttaaacaaaagaatgctctttttaaagttatcttttaaatcaagcaactgatttctaaggaatggggctaatgagattatcctgagttcactgttgtagattgtattctttccaaaaaaacttttattgatattggggagtgggcggtcatgagggatggggtgggggtgagtggaagacaaggaaaaatgaaacctaaaaagtacaaagagatctgatggttttaaaagtaaagaccttaaacatcacttcatcagctcaggcagctcacacacaggtgagtaaacacaaaaccggagaagtgtccccagcaccccttgcaagagggacaggactgctgaagctgtcagcaggggagggtgcaactgttccacttgcttcagcttttcctgccatggtgcctgctctgtgacatccaaagagaaccaaagtgggactggaaacccagttactaggaaagcctatcataccataccccagcttaaagcctgccagaggctgctcgctgcattcaacccagaatctaaacctgtggccctggtctgcttatgagatctagtcccaccctctcctcaccagtgggagatgccctggactttctgttccttaaacacgggagtgactgtggtcccatgcgagaccttgattcctgctgttccttactcccagaacactcttcaccctcgcacaactggctcctcctacttgttccgctttcagctcaaatgccctccctgaccagtcaaaagttcaatttgcttttctcgcccatctctagcacctcacccagtgccatttcctccacagcacttagtaaatctcacttggttagtgactgtctaccctttctaataagttctctgagaacagaaccttatcttctttagtaccagattctcaacgcctgagtgatcaaaaacctaagtagaaaaaaagggagtccacgcacggtggctcacacctgtaatctcagcactttgggaagccaaggcaggaagatcacttgaggcctcgacttcaagaccagcttgggcaacacagactctctgtcaacacacacacacattagccaagtgtggtggcacacacttgtagtcccagctactggggaagctgaggcagatcacttgggcccagaagttagtttgaggctgcagtgagctaggatcgcatcactcccctccagcctgggtgactaagacagaccctatctctacaaaatagatacatagatacagatctgtgggtagaggagaattctgtccagtctcagagagttggaaagtgctttgcaacaaattttagaaaaagtaaaaactcctgcttcacccattcctctggccccaaaaactagttagcagtatgccttgtggggaggagccaagatggccgaataggaacagctcccgtctgcagctcccagcgtgagcgatgcagaagatgggtgatttctgcatttccaactgagctttgaagagagtagtggttctcccagcatgtagcttgagatctgagaacgggcagactgcctcctcaagtgggtccctgacccgagtagcctaactgggaggcaccccccagtacgggcggactgacacctcacacggccgggtactcctctgagacaaaactttcagaagaacgatcaggcagcagcatttgcggttcaccaatatacactattctgcagccaccgctgctgatacccaggcaaacagggtctggagtggacctctagcaaactccaacagacctgcagctgatggtcctgtctgttagaaggaaaactaacaaacagaaaggacatccacaccaaaaacccatatgtacgtcaccatcatcaaagaccaaaggtagataaaaccacaaagatggggaaaaaacagagcaggaaaactggaaactataaaaatcagagcgcctctcctcctccaaaggaatgcagttcctcaccagcaacggaagaaagctggacggagaatgactttgacaagttgagagaaggcttcagacaatcaaactactccgagctacaggaggaaattcaaatcaatggcaaagaagttaaaagctttgaaaaaaaattagatgaatggataactagaataaccaatgcagagaagtccttaaaggacctgatggagctgaaaaccaaggcacgagagctacgtgacgaatgcagaagcctcagtagccgattcgatcaactagaagaaagggtatcagtgatggaagatgaaatgaatgaaatgaagcaagaagagaagtttagagaaaaaagaataaaaagaaacgaactaagcctccaagaaatatgggattatgtgaaaagaccaaatctacatctgattggtgtacctgaaagtgacagggagaatggaaccaagttggaaaacactctgcaggatattatccaggagaacttccccaatctagcaaggcaggccaacattcaaattcaggaaatacagagaacacctcaaagatactcctcgagaagagcaactccaagacacataattgtcagattcaccaaagttgaaatgaaggaaaaaatgttaagggcagccagagagaaaggtcgggttacctacaaagggaagccaatcagactaacagcggatctctcagcagaaactctacaagccagaagagagtgggggccaatattcaacattcttaaagaaaacaattttcaacccagaatttcatatccagccaaactaagcttcataagtgaaggagaaataaaatactttacagacaagcaaatgctgagagattttgtcaccaccaggcctgccctacaagagctcctgaaggaagcactaaacatggaaagggacaaccagtaccagccactgcaaaaacatgccaaattgtaaagaccatcaaggctaggaagaaactgcatcagctaatgagtaaaataaccagctaacagcataatgacaggatcaaattcacacataacaatattaactttaaatgtaaatgggctaaatgctccaattaaaagacacagactggcaaactggataaagaggcaagacccatcagtgtgctgtattcaggaaacccatctcacatgcagagacacacataggctcaaaataaagggatggaggaagatctaccaagcaaatggaaaacaaaaaaaggcaggggttgcaatcctagtctctgataaaatggactttaaaccaacaaagatcaaaagagacaaagaaggccattacataatggtaaagggaccaattcaacaagaagagctaactatcctaaatatatatgcacccaatacaggagcacccagattcataaagcaagtccttagtgacctacaaagagacttagactcccacacaataataatgggagactttaacaccccactgtcaacattagacagatcaacgagacagaaagtcaacaaggatacccaggaattgaactcagctctgcaccaagcggacctaatagacatctacagaactctccaccccaaatcaacagaatatacattcttttcagcaccacaccacacttactccaatattgaccacatagttggaagtaaagcactcttcagcaaatgtaaaagaacagaaattataacaaactgtctctcagaccacagtgcaatcaaactagaactcaggattaagaaactcactcaaaaccactcaactacatggcaactgaacaacctgctcctgaatgactactgggtaaataatgaaatgaaggcagaaataaagatgttctttgaaaccaatgagaacaaagacacaacagaccagaatctctgggacacattcaaagcagtgtgtagagggaaatttatggcactaaatgcccacaagagaaagcaggaaagatctaaaatgggcaccctaacatcacaattaaaagaactagaaaagcaagagcaaacacattcaaaagctagcagaaggcaagaaataactaagatcagagcagaactgaaggaaatagagacacaaaaacccttcaaaaaattaatgaatccaggagctggtttttagaaaagatcaacaaaattgagactgctagcaagactaataaagaagaaaagagagaagaatcaaatagacgcaataaaaaatgataaaggggatatcaccaccgatcccacagaaatacaaactaccatcagagaataccacaaacacctctatgcaaataaactagaaaatctagaagaaatggataaattcctcgacacatacatcctcccaagactaaaccaggaagaagttgaatctctgaatagaccagtaacaggctctgaaattgaggcaataatcaatagcttaccaaccaaaaagagtccagggccatatggattcacagccgaattctaccagaggtacaaagaggaactggtaccattccttctgaaactattccaatcaatagaaaaagagggaatcctccctaactcattttatgaggccagcatcatcctgataccaaagcctggcagagacacaacccaaaaagagaattttagaccaatatccttgatgaacatcgatgcaaaaatcctcaataaaatactggcaaaccgaatccagtagcacatcaaaaagcttatccaccatgatcaagtgggcttcatccctgggatgcaaggctggttcaacatacgcaaatcaataaatgtaatccagcatataaacagaaccaaagacaaaaaccacatgattatctcaatagatgcagaaaaggcctttgacaaaattcaacaacccttcatgctaaaaactctcaataaattaggtattgatgggacgtatctcaaaatattaagagctatctatgacaaacccacagccaatatcatactgaatgggcaaaaactggaagctttccatttgaaaactggcacaagacagggatgccctctctcaccactcctattcaacatagtgttggaagttctggccagggcaatcaggcaggagaaggaaataaagggtattcaattaggaaaagaggaagtcaaatggtccctgtttgcagatgacatgattgtatatctagaaaaccccatcgtctcaacccaaaatctctttaagctcataagcaacttcagcaaagtctcaggatacaaaatcaatgtacaaaaatcacaggcattcctatacaccaataacagacaaacagagagccaaatcatgagtgaactcccattcacaattgcttcaaagagaataaaatacctaggaatccaacttacaagggatgtgaaggacctcttcaaggagaactacaaaccactgctcaatgaaataaaagaggatacaaacaaatggaagaacattccatgctcacgggcaggaagaatcaatatcgtgaaaatggccatactgcccaaggtaatttacagattcagtgccatccccatcaagctaccaatgactttcttcacagaattggaaaaaactaaagttcatatggaaccaaaaaagagcccacattgccaagtcaatcctaagccaaaagcacaaagctggaggcatcacactacctgactgcaaactatactacaaggctacagtaaccaaaacagcatggtactggtaccaaaacagagatatataccaatggaacagaacagagccctcagaaataatgccacatatctacaactatctgatctttgacaaacctgagaaaaacaagcaatggggaaaggattccctatttaataaacagtgctgggaaaactggctagccatatgtagaaatctgaaactggatcccttccttacaccttatacaaaaattaattcaagatggattaaagacttaaatgttagacctaaaaccataaaaaccctagaagaaaacctaggcaataccattcaggacataggcatgggcaaggacttcatgtctaaaacaccaaaagcaatggcaacaaaagccaaaattgacaaatgggatctaactaaactaaagagcttctgcacagcaaaagaaactaccatcagagtgaacaggcaacctacagaatgggaggaaatttttgtaacctactcatctgacaaagggctaatatccagaatctacaatgaactcaaacaaatttacaagaaaaaaacaaacaaccccatcaaaaagtgggcaaaggatatgaacataacacttctcaaaagaagacatttatgcagccaaaaaacacatgaaaaaatgctcatcatcactggccatcacagaaatgcaaatcaaaaccacaatgagataccatctcacaccagttagaatggccatcattaaaaagtcaggaaacaacaggtgctggagaggatgtggagaaataggaacacttttacactgttggtgggactgtaaactagttcaaccattgtggaagtcagtgtggcgattcctcagggatctagaactagaaataccatttgacccagccatcccattactgggtatatacccaaaggattataaatcatgctgctataaagacacatgcatacgtatgtttacagcggcactattcacaatagcaaagacttggaaccaacctaaatgtccaacaacaacagactggattaagaaaatgtggcacatatacagcatggaatactatgcagccataaaaaatgatgagttcatgtcctttgtagggacatggatgaaactggaaaccatcattctcagcaaactatcacaaggacaaaaaaccaaacaccacatgttctcactcataggtgggaattgaacagtgagaacacatggacacaggacggggaacgtcatacactggggcctgttgtggggtgggggaaggggggagggatagcattaggagatatacctaatgtaaatgacgagttaatgggtgcagcacagcaacatggcacatgtatacatatgtaacaaacctgcacgttgtgcacatgtaccctagaacttaaagtataataataataaaatttaaaaaaaaaaaaaagtagtaggaaggatatttgataaagctttgtggttaacagtattttgaaatatatttgcaatttaatgtaatatgtgtcattggagtggaattattagcatatcagagctttaaaaaatatgaataaccccagttactatattgaaaaggtttcctttatagacaagagcagataaagctggatttgctcatgcattcagcaaacatttgagtacctgctctgtgtcaggactaaaaataatagatttttcaagaggaataatcacagaatttgtcttacaagaatggtgctcccatccctggggagaagattatgagcaaggaaatacactgtgaaaataaaatatgaaaagggctcaggaacattcataagacatatatgaaaactgtaacttggaaagttgccacattaatactttttaaaagttttgctaatgaattagtcctgattaaaaagaaatgatcctagtctccaagatagtaaatattttaatactgctcaattaaaaatccttttctactattgtggacctgtccaattgacatggttagagttatcaggaattacattgcaatctactctgtaccactaagtctaacatgttgtttgtcattttctaatatttcatataattgacaataacattttctgtaaatattttattatataaattttatggttgaagtggcaaaaaatgaaatattcaagaaagcatttaatgctttttatttgccaatttaaaatatttttacacattaacaagtgataatggttatggcacaccatgccacagacaatttgccaattatatgactcagaaatcatttaataccttaagaatcaacattagtttctaaactaatgtcggttgggaaaatattgttttcctatacaactttctctggttccatttattagagcttaacttttatataagaatactcataactgtgttgcatttccactatttagtttaaatatatgttttagaatatttattacttaaatgataattagaaatgttatttgtgaatatttttatgtaaaaaatgcttctaaacctatattaaatatataaaaactgtaagaatatattgaaacttagtcataaaggtcaaactacttgtcttctaattgttcattaaaacttgagataaaaactaaaaaaaaaagaagtatgccttaagagttgcacaacggcccctcaacacaactgcccagtccacaggagctacttcataaatcgactgcactgacctctaacctctgtgtactcagggcaagaatccagtgcagtggacaaagggcaagagttttcacaggaagtgccgacacacagctaagacaccagctgaggtggtggcggcacagccctgcagctaagggtgagctctggagtcctcatctcgctgcctaccagcctgtgatgctaagcaagtaacttcatctctgtgaaccttgcagtcttcattgataaatggagctaatgcctgtctatgtcaatggggtacctaagaggatcggctgaaagggcactaaaccactaagcgcgggagttggaaaaaataataatccataaagggtagttgcctttatcagaaagatccaggccgggtgaggtggctcacacttgtaatcccagcactttgggaggccgaggcgggtgaatcacctgaggtcaggagtttgacacagcctgaccaatatggtgaaaccccatctctactaaaaatacaaaaattagccaggcatggtggcaggcgcctgtagtctcagctacttgggaggctgagacaggagaattgcttgaacccaggaggtggaggctgcagtgagccgagatcacaccacggaactcaagcctgggtgacagagtgagatttgtcccccgcccccctcccaccacctctccaccaccccacccccccccaaaaaaaagatccacaactccattctcattcttgaccaagccactttaatttgtaactttaatgtgcaatatgaagtcgataatccttgaaattctcacctggctcctgcaggaaaacaaaagtagaaagctttaagtacttttatattcactaattcaaatccataattcatttattcaattattcaagtatttattgagcactgatcatgtgacagccttgtagacaagagaagcaaaatcacccttcctctctcaagggtttacagtccagtcattaaaacaaatttgttggccaggtacactggctcacacctgtaatcccaacactttgggaagccaagaggtggatcacttgagtccaagaatttgagatcagcctgggcaacatggcaaaacctcatctctacaaaatatacaaaaattagccaagagtagtagtcccagctactgagaaggctgaggcgggagaatcacttgagctcaggaggttggggttacagtgagccatgatcacgctgcactccagtctggatgacagaatgagaccctgtctcaaataacataacataacataacataacataacataacataacataacataaaacataacataacataacataacataacaaactaaaataaaataaaataaaataaaatataaaataaaagcatgttaaataaaaacatattaacccctaggggtttatgaggaaagggaaccttcttagtacctccctttttaaagaagaaaaattcttgacttcctgacctggaaaatgaaaaagccataaccctttactgtttaaagagttagttttcatatagttctatatagtaatactcccatatgctggatctatttaaatgttgagagcaggacactgtagttttgcagctacgtactgtaagctccatctgtcctgttcaccactgtaggcctgtgcttggcacagaattggtcttaatatatctttgatcagtggatggataaatgaaaccctaaaattataacctaacttaggaaaaaaatttttttttattatacaatgggccaggtgtggtggcacatgcctgtaatcccagcactttgggaggcagaggcaggagaatcatttgagcccaggagttcaagaccagcctgggcaacatagtgacaccctgtctctacaaaataaaaaatgtaaataaaataaaacatacaatgaaaaggaagaagagaccaaagcaaatgtgaaaacttaaggcagaaatcagatacatggccaggcgtggtggctcacacctgtaatcctagcactttgggagtctgaggtgggcagatcacttgaggtcagaagttcgagaccagcctggccaacgtggcaaaactctgcctctactaaaaatacaaaaattagccaagtgtggtagcatgtgcctataatcccagctactcaggaggctgaggaaggagaatcacttgaacctggaaggcagaggttgcagtgagcccagatcacgccactgcactccagtctgggcgacagagcaagactctgtctcaaaaaaaaaaaaaaaagcagatacaggacatggttaactcaacttcatgctgttagaatatgcagttttttcaagtccatcataggcacaaagtaaaaactaatgtttatgaaaaaaggtaaatatgacataaagaaatttggagcacacccacttgtacagagtgaggctgagtctacaccttcagtcttcatcatcaggagggatacctaattcttcatctgtccactgggaaggatcaggatacggaaagtgaccctggtgacaaccatttaaaagaaagaaaagtcaagaatttacattctgtgcaactaattaaattgttaaataaatcttggaaagaaaaaaaaaaaaacaatatggctcagcccctgaccacaggaacaaattctactttaattattcgatggcccacctgttctttagtttgttcattatatgggctctggtctgaattttaaaagcctccccatttggaggtaccagcctaagccaatggtacgtgtctgtgatagagggagggtagggggaagtggaggcaataggtttcaaaggttcctgacatcctggcaaagtcctggcaaaatatgtttccaactctcctaacattactgctgtgaaatggagaagcctcaggtggacttcctcatctccaatcctgatctaagggcttatctggctgcatcatcatcatctcaggcctaacagctatacatactgtacatactccggacagctgacctacagtgaggcaggggcacctcaaatagtaaatgtgtggacagttcacagacacccaggcagctccttactgaaggacaacggcacagagaagttctaagagaaatgggatatgaagcaacctgatgcttctaaaacttacatactgcttaagatttttttcctatcctggaaacaaacccaaatttactacaactcaaagtatcctggataaacaagcacagatttcaatgtcttaaagacgtaatttcccaaagaacggtctgcaaatgtggtaaaacctcagttgaggctaatgatatgttagaaaatcactaaaactggccgggcgcagtggctcacgcctgtaatcccagcactttgggaggccaaggcaggtggatcatgaggtcaggagatcgagaccatcctggctaacacggtgaaaccccgtctctactaaaaatataaaaaattagccgggagtggtggcgggcacctgcagtcccagctacttgggaggctgaggcaagagaatggcgtgaacccaggaggcggagcttgcagtgagccaagatcgcaccactgcactccagcctgggtgacagagtgagactccatctcaaaaataaataaataaaatagaaaatcactaaaactaacttcccttctcaagacaaattaactcacatccatcccacccaaacctggctgccctgggcctctggacagaccagaagacattcatcatttaaaggaatttaagtgtgaaacctaacctaccaatgaaccgctagttcagaaggtaaaagaattcatttctggccaggcgcggtggctcacgcctgtgatcccagcactctgggaggctgagtcaggtggatcacttgaggtcaggagtttgagagcagcctgaccaacatggtgaaaccccgtctctactaacaacaaaaaaaattagccggcgtgggggtgcacacctgtagtcccagctactcaagggactgaggcaccagagtcacttgaacccgggatgcagaggttgcagcgagccgagattgtgccactgcactcctgcctggtgacagagtgaaactgtgtctcaaaaaaaaaaaaaaaaaaaatgagcttttagtctccctaagatggcaacctaacagaaaccataagaaacggaccacctaaatatacatcctcgtgtaaaaaaaggtgagaagataacatgtttcattaaataacaggattcttgtatatacatatggaaaaagtggtggcaaagggcgatgtccagacagaaaaatggtctacaacagaaaaataaacaagctattaatacatcctccctcccccacccaaaaaacgacaagtgctcttctcctgcacttaccagcacctcttctgagtcatgccaaaagcgccagagaatccagaaccacatgagtccgctgaagaactcgctctggaacacctgggatctggtcagctgggggaactgtctataccggggctcaatgtgcacaccaccaccggcactgcaagacaaaacaacatggcagacagcgtgctacattctcaaagcgttaagtcatccaaaactcctctgagttacatcctagaaccaacgctaatgtttctcatctccactgaaatatagacagaagttcacaatcccttgaaatactcactttttactaagcttgcttcatgtgtagcagcaaaaactgaccaaaactgacaagaggctaattttggttttcaattagtgaagattcattattttgcactagaaatttgaatgtgttgattctggggtgctagccccaaaggttttagttaagggactgtgaacttgttagcaggtcactaacttactcagaaaaataaattaattttgctttgtttagctatctatttgaggcaaattatgtcctctgcctattacaatctttattaaaagacaaccatatgggagagaggactcgcaaatcctattaaatatgctaatggctctgaacaaagaactttaaacagtaagtttgaatacgtgtttcttttttcttcttttcattcagacacttgacaagttgtggcacagagtccataagagttatagtcaatttattcagttggagtataaatattatacgttgcatctaatttaaattatttgcacctactggggctattcctaaaacctattcatcagccatatatatgctaataaacagaagtggataaaaaatttttaagagaattcctatataaaatatgtttaccaatttcatctagataagaatcagcttgtaaaccatattctcttttatgtagcacagaaattcgtacctgtaggaaaagtgcattaaaatatcttgtcttcataatgcacagattcgtgaacagtaacagggcagtggttcttgatacatgttagctaggactgtttgttttctttgtttgtttgtttgcgagagtctcactctgtcacccaggctggagtgcaatggaacaatcttggctcactgcaacctccgcctcctgggttcaagcgatcctcctgcctcagcctcccaagtagctgggactacaggtgtacgccaccatgcccagctaatttttgttttttttttagtagagacggggtttccccgtgttggccagactggtctcgaactcctgaccttaggtgatccacccaccttggcctcccaaagtgctgggattacaggcgtgagccacgtgcccggctgttttgtttgtttttttaaagataggctctgtcgcccaggctagagtgcagtggcgtgaccttagctcaagcgatccttctgctgactgagcacctcctgggctcaagcaatcctcctgcctcagcctccctcccaagtagctgggattacatacaagtgtacacccccagacctggctaatttttatattttttttgtagagacagggtttccctatgttgccaggctggcagactgtttttatcctcccccactctaaaagatgactggtagttattgagtgtttaccatgtgccagataccacactaagcattttataagttttaattcatttaattttcataatgttatgataaggcctgtaattattaatgatttaccagtgagatgctgtgtgatggcaaagcctaagctgttgcctacagacacacaccattaacaattttctccttttattaatcaaagacataacttttaactagaattccaaccagcatgataaaaccaatgttaccatattgaaatgataaattccatttttttttctaaatagtcatccaaaatttaacacttttatttggaatgctctatttaaggtattaataactaattatgaataaggtgatttttagtttttgcagatgtgtgtatatatgtacttttttaagtatcatgtttaaaaggtcctaccaaatatcgccactttacaacttgaatgacgtagcatactgtttccgtaatgtcctcatataccaattatattattcattcaggatctagctgtgcatatagatattacattatgtaaataaaccatgcaggatcattcaatatagtataacaagagcttttttttttttttgagacggagtcgcactctgtcacccaggctggagtgcagtgacacaatcttggctcactgcaacctctgcctcccagttcgagcaattctcctgcctcagcctcccgagtagctgggattacaggcatgtgccaccatgcccggctaatttttgtatttttagtagatacagggattcgttatgttggccaggctggtctcgaactcctgacctcaggtgatccgcctgccctgacctcccaaagtgctgggattataggcgtgagccacactgtgcccggccaagagccttcttctttgatagctttttgatacaatctaggtataagtgcccagcagtaaaactgattaaaacaagatttgaaggccggacacggtggcttatgcctgtaatcccagcattttgggaggccgaggcaggcggatcacctgaggtcgggagttcgagaccaccctgaccaacgtggaaaaacctcgtctctactaaaaatacaaaattagctgggcatggtggtacatgcatgtaatcccagctactcaggaggctgaagcaggagaatcacttgaacctgggagacagaggatgtggtgagctgagatcgtgccattgcactccagcctgggcaacaagagcgaaattctgtatcaaaaaaacaaaaaagatctgagtaatgccgatgccagcattatagttcaaacccatcttagcagctccccacgcttcgttattgctagagtgacatgttgttttaatcataacctgaagtagggactgcaaaatggaaaccttttggaacaaagatttgaaagtctgcaattatatcacaggaacaatgacaaggattgccatgattaaggaatgcaaagactcaacacctaattcacaatgttatgttccaaaccaggttgtgaactgcattgtggcaaactagataccctgaacaaccctccaaattaacaactctgctgctagatgagatttttaagatttttacaaacatcactgaccaggcacaaaaggaaggaatccaccaagagcaaaattcaagtaaaaacaaggcctggaagctaagcaatcaatcactgaagctgccttcaccgggagcccttgaacctccaccaggatagctacatgaggtgtggggaaagagacgcagcctggggcccacccaaggtgggaaggctaatgacgaggtcactgaataaagctgcaaccccatatggtaaaagggtgaacaagaaataaaccttccatggacaagggaacaagaatttgttatcagaagccagtcctcaggtagatttgcacccaaattcacattacctgcgttggacctgtgtggaccaaaaaccccaagccgagaatttaatgtgagcctgaattggggtggcaccctcaagagactaagagaagcacgatctcaaagaaattccagggaaaacaagctcaagatcaaaaaacataaggaagtaagacactatcagcaagtcctgtaagaaggaaagagaatggggaagaaacaacatccaaggaaataatggctgttccaacttcaaatgtttgagagtcaagtttaaaaacaaaaatgcaccataactctattagttacatttttatttttatttttttgagacggggtctcactctgtcacccaggctggaatgcagtggcacgatctcggctcactgcaacctctgcctcctgggctcaagcaattctcctgcctcagcctccccagtagctgggattacaggcgcacactaccatgcccagctaatttttgtgtttttagtagagatggggtttcaccgtgttggccaggctggtctcgaactcctgacctcaggtgatccgcccgcctcagcctctcaaagtgctgggattacaggtgtgagccaccgcgcctggacaaagttacatttttaaaaaataaatcagaccacattactttcctgctttaaaactccaatggctccctgtgattcttagaataaaattccgagtcctccaaagccccctctaatccggcccccacacttgtccctgtgacctggtctctcccactcttcccctacgctccactccagcctggcctcctgccaaccctgcgggctctggcctctccacctgatgcctcctctgccctcttatgtccaccgggctcttcccttgaggtctctgcatggctgacttctcatccctcaggtcccgcttcaaatcacactcccaggcattcccacgccatccccaaatacaatatcccttctactcccacaccacgcattctccatattaatccccagctgtattctcttcataacccttaacagtactcaaaaaaggtctttcttttctactggtctctcctctccagaatgtacacttcattctctctcgtattctgctatatcctcagcacctagaaaggagcagccatatagaagatgctccataaacatttatgcacttaattatcacacactctgaaacaagtgtgtgttacgaacaagccagcacctcagggaagatcggcattcccccatctcctcatgcaggaccaagggctgtcgctcatggctctccatcactgtctttgcccaagtcacacagggctttgccttctgcccaccccacacctgccccagctccagattcttcatccatgtgggacttcaggcaagtcactcctttcatttcctgggcctcagttccttaataacaacaacagttaaagaatacttgtacggtccttagcaggcaccagcaattgttttaaacactttagtgagaccaagcgcagtggctcgcctgtattcccaacactttgggaggccgaggctggagaatcacttgagcccaggagttagaggctgcagtgagctaggatcgcgccactgcactccagcctgcctgacagagttagaccccatctcctaaaacacacaaacacgctttagataacagtaactcatttagttccttgcaaatggacgccaaatgggtgaggaaactgaggcattaagagaataagaaacttttccaaggtcccacagctggagtgtggcagaggtgggatttgaacccagccactgtgcggccagaatcccgcttggaatcacgaccccacactgcctcttggtaaagtgtagctgatgatctaagggacctggaatcatccatgactcttttccagtcctgctcttacggaatctctgcacaccactaactcggcttcggcagctgctccctacctcgcacccgctccctacctcgcacccccagccctccgccctccggtctgcgtctcgggccacctcgcgggcggctctgcctgtcactctcctaaacgccacggctgccccagcgttggcttccggctttctgctcctctcacccgacggcgctctctctgggcgacagcctccactccctgcagccagagtgatttttcagcattaaaaagcggccacgtgacgtctccgattaaaggctgccgaacagactctaccctaaattccgcagccaggcaccgggaccctggaccgcgccctccctaggcctcaccgccgccgccccccgcctcgctccaggagcgtccacacccgccgcgcacgctgcttcctccgcctggaccgcccgcgccggcgccgactggctcagcccgctccgcattcacgcgtgcgtctcccgagggcaggcggcccctactaccatgacggccctgcacacggtgtcccatctgcccagcgaagtctctccctctccctccggccagcggggtccctctcctcgagtcgcggcttcaggagacacgcggactacaggtcccagcatgcctcgggacgcggcctcttcaggcgccccagtcaaggtgagagcgtcccagggacccgcgctgtccgctacaggccggcgaggcccccatccccagccccacactcactgacggactccaccatctccagcagtccgtgcgcagccgcttctgaaaaggcggcctccaacgcgagcgaaagacgccagccgagtcagagcggacatactcgctcccgtccgccccgcggtccccagccgcctcgcccctgcctacttcgcttccccggcgctccgcccgcgcctcccgtgacgtcacagagtcgctcatctccaggagtgggggagccggcagccgctcctgacccagattagctgtgagtccttcggctgcaggaaacctctctcccgagagcaaagcccacgcataacttatggttgctgagctgccccatgccttctgaaacagcttgttggttgcccctctgatcctgtagggctctccccgtgttctgcccctcctaaaactgagtggtgtataattcttttttttttttttttttctttttgagacaaggccttgctctgtcacccaggctggagtgcagtgacaccatctcggctcactgcaacctctgcctcccaggctcaagcgattctcctgcctcaacttcccgagtagctgggattacaggcattgtgccaggctaagttcgtacgcagcaatagataatgccacaaatggcttgattcgatccactggctttaaggctgggttggcataggctcagggaagagactgccgtctttttgtccctttcccgcctccacactgtacctgatgcgcactggcacgaggggctgcgtgaccagctggtgttctccctcccagccatctggagccatcccaacccctctctgcctgctttgaatgtcccctcaagacctgggaaggaaaaaataacatcacctccttgaaaaaaactgcaccaaaggaatctctgtccacctaaaccatactgctcactaaaagacaggaatgaggaactttatcctggagaaggaaagaatgggagaaactagtcctgtagtcagggcaggactctcggagagcgcaagggcttgactccattcgctgcctggtggtctctaagacgagcaacataatctatgaaggtgcagggataaactgtgattttacctaaaaaaaaaaaaaaagagaaattaagctttacaaataccccccctccaggctgaccccgggcccctcctagtcagccagacggccacatcagctcagctctgagaagaaagcccgtggttgggcctggcagagaggggcaggtggtggtcactgcaggtctgtccctgggcgctgccatggagaagaggacacactggttatattaactctcttcatattcaccaaaattaatgcctgcaagtggacaggcgcagacactgtggcagagaaactgtagttccggactagcgggtgaacccggggccatgttaaggaagtggccaagccgttctgctcacgtccccggtatgtcagccactttcatcagttttgttttaccttgtaataaaagttaccaaggagttagcaaaatctattaaaaattaccaagaagataatttgaagtacaatgaaatttgccctaagtgtatattatgctggcaggtagcacctgcatgatatttatacataaagagtgtgtgtgtgtgtgtgtgtgtgtgcacatgccacagatcagtaggacttgatggcattttctaacctgaatatcaaagtctgggaactaccagcagtacccatctgaccagggagtatagcgggtcaagaaatgagaaaaacaggaaaacaaaataaatttattcgtcctcctccacataacattttccctgaaggagagtgtccctggcacctggcccagcttccacaatggaatggataggccccttccctccttttactccctaattggcccaaagcttttgaacagaccctcaaaccaagcagaggaagccatggtgtgccttccaccactggagggttacatttgaaattggtgtcccaattttaaaacgtcccagctgccataggagaggctcttgggagtggcctccagctcttgacaagggcccacagaggccactgccccatcacggggggcacactgggcccgtgaggaggaagggcctcgctgcctccaggatgtccagtttggggtccagtgagcggccaagcccctccaacaccatgatggcaaacacaatggaggcaaagttgctctcaagctttacctggaacagaaaaacagaacagttcatctcagaacatgctgatacagggacgtgtgttctggataatcaccttgctgtccactctcagcctccctcagacctgcccacgggatgtttaccatctacctgacattctcttctctaccgcgtcatctccccaaccatctcacctactcgcccagcctcccatctactggacacactaaggaaaaatctaggggtgcggaatatacttttctaggtttgtgtccatgtgtgtatgaatgaatgaccaaataaatctttcacacacatcccagaaactatacatttaaatacaggtaattcttcgaaacctacagtaacctttatgtatgtatgtatttatttatttattttagagacagggtctcactctgtcacctaggctggagtgcaatggcaagatcatagctcactgcagccttgagctcctggacttcagggatccttctgcctcagcctcctgagactgggactcttttttgtaaacagagggtcttgcaatgttgacgaggctgatctcgaactcctggccccaagcaatcctcccaccttggctgccccaagtgctgggattataggcaggagccatgtcagctggtctacaatagcctttttaagagacaacacacaggccgggcgtggtggctcactcctgtaatcccagccctttgggagaccgaggcgggcggatcatgaggtcaggagatcgagaccatcctggctgacacagtgaaaccctgcctctactaaaaatacaaaaaatcagccgggcatggtggcaggcgcctgtggtctcagctactcgggaggctgaggcaggagaatggcctgaactcgggaggcagagcttgcagtgagccaggatggctccactgcactccagcctgggcaacagagtgaaactccatctcaaaaaaataaaaaaaatcagagacaacacacaattgactgctcaaacagggtacagctgtcccttcagagccagattagtagtaatagcaattgacatggattcttcaactattcttcaaaagtatcatcgttatccccattctatagagaaagaagctgtggctcagagaggttcaatgacttgctcaaggccactgagtgaggaggaatagagccagatgtaaacctagaagaacaggaatctgctttttaagtggacagaaggtcaagaaatggaaggttgaatcatgggaaatattctttgttagaaattaaagagtatttgtctccgttaagggctggaaggttgtcggggtcaggtggatccagaagcagcagcatgctcccaggagcagcttgtggagttccagcctggcagattggccacacaggctctggtccgggtgggaacccagggctctaacacctctgggaatgctttcattctgaagctgggtggggggttcttagtgtggattagattcctttatctctgtgttactgtcaaatactttatttaaaaaaattaagtgctacctgaatagatatttcttctaaggaagatatattatacaaatggccaattggcatatgaaaagatgttcaacatcatgaatcagtagagaaatgcaatcaaaaccacaatgagacatcacctcacacccattaggatggccactaaaaacaaaacagaaaatgacaagtgttggtgaggatgagagaaacgaccccttgtgtactgttggtgggcatataaaatggtacagctcctatggaagttcctcaaaaactaaaaacataccatatgatccagaaaacctactttggggcatatgtttaaaaactggaaagcaagaacacaatgtatagaccttactggctacattaaatgtttttaaaacttttctaaaatttgaaagtaggatcttgaaaagatatttacacattcatgttcactgcagcattattcactataaccaagaagtggaagcaacccacgtgaacatcaacagcatcaacagaataacaggccaagcgcggtggctcacgcctgtcatcgcagcacttcgggaggccaaggcaggtggatcacttgaggtcaggagttcgagaccagcctggccaacatgacgaaaccctatctcttactaaaaatacaaaaattagctgggcatggtggcacttgcctgtaatcccagttacttgggaggctgaggcacgagaattgcttgaacccaggaagcagaggttgcaatgagccaagcttgcaccactgcactccagcctcggtgacacagtgagaccctgtctcaaaaggaaatcctgtcacatgttacaacatggatgaaacctggggacattatattgagtaaaacaagccaatcacaaaaggacagtatactttataattccacttatatgaaatatcaagagtagccaaaatcatggaaacgtaaaacagcatggtggttcccagggccggatggagaggggaatggggagctggtcaatggctgtagagtttcagctctgccaaatgagaaagacctagagatctgttgcacaatgctaacactatgcatctggagagggttggggggttaaattttatgtgtttttcatcacaatgaaaaatttgtaaatgttttcaaacttaagtgcctagtgaagtgcttggagtgcagtagctgccctaggccctctgtctcctcttccatcctgggaacagcagcagcagcagcaaacactcaaggcccctcacccaccgtgctggaaactgtgtggggagcagatgctcagagtgagccacggaggcgggaggacccagcagcaggcgggggcttgcccacatggccacaggtgagctgctcggcctctcggctttggtgcctgcctcttggaagactgaggggataaattggttactaatagatgtcatatagttaagtaatgcaatggaaaaggccatcttccaacgaggtcctcccttctccaccttcaacactgcttgtccctggccagcagccttagtttaaagagtgccggagactaggctccatgacaaggcgacagagccggggcacaggctaagatgaaccatgaggccagctccctctaatggactacagcagccaggcaggggccacagcagtcccgctagggcctctgaaagcaccaggacacaaggcatgaccctctagagcggcctctggaccccaggacttcattccaccaggaaagagctaagcatgacttacattaacacaagcatcatgaaagtgaaccaaggagggaaagacatgaaaagccagaggtaggctgtttctacatttttaaatacacttttctacatttaaatgtcacagatacttagactgcactgacttgacagatagactaacagctacgaagcacttgttgcaaatggcttgttactaaaaatgctttcaaaatatataataggccgggcacagtggctcacgcctgtaatcccagcactttgggaggccgagaagggtggatcacctgaggtcaggagttcgagatcagcctggccaacatggtgaaatcccgtctctactaaaaatacaaaaattagccaggcgtggtggtgggagcctgtaatcccagctactcaggagactgaggcaagagaatcactggaagccaggaagcagaggctgcagtcagccgagatcgcgccactgcactccaccctgggcgacagagtgagactctgtctcaaaaaaaagaaaaacaacaacaaaaaacaagaaccatataatagaagcgcctcccaccaccctgtgtcctcccattcctccctgccccgtcccaccttccccagagacctcccctctgaatggccctcaccttgtgagtcatcagcaacttaaagacactagagagaaggctggacacatgaagctggaaaaacaaaataaaggctaatgcagaccaccgagccttccagaaccgctcatttcccaccacccccacactctcagccccagcatcccaccccactcccccgccagggcacacatacaccagtcagcacaaaagggaccatctgacaaactctgaaaggactcctccagcacaagcccaactccacctcaagactcggtcacagaggcctttggaagacaagcctttgagccccacccaccccatccctgaagcaaccacaaaaatcacacctgcctataatcctagcactttgggaggccaaggcgggcggatcacttgaggtcaggagttcgagaccagcctggccaacatggtgaaaccccatttctactagaaatataaaaattagccgggtgtggtggcgggtgcctgtaatcccagctactcgggaggctgaggcaggagaatcgcttgaatccgggaggtggaagttgcagtgagccgagacagcatcactacactccaacctgggtgatacagcaagactccatctcaaaaaaatttttaaaaaatcacacctggatagactatcagcagggccagcgtgccagtggccactccttgtctgacccattcctgctaatgtggccatgaacttggggataaaacagtcacatttgctagaactgtgtataaaatacaaagcaggctctggcttgggtttaaataagggacatgcgcattgggcacatcatttggctgcttggagaccacagtcctccctccctgtatgcttggctgtccccaaatgaacagcgacccctggatgaggaaggagctgcagcctcctaagtggcaccgcacaaggaggcccccttgagcacaacggacttcactggggctcctcatgcctggaagatgtggggtggttctttttctgctttaaaactcacacccctcataaagaggtctcccttagacccaggatctgctctgccccaggccaggtatggactccccagcccctgttccgcaagtgacctgcccaccttctccagggtgatggtgttcttcctggcctgggtcaccagcatggccatctcggttttgaacccctccacgtccctgcactcgctggcccgggcatgatgcaggatcagctcagccactctctggccctggaaaatgcaacggaaaagggacttggagtggagctagcataaacctggatgcggtgcccaagcgtctttctcatctcagcagctccaccctgacttttctggcatcttgcttttggctcttcctcctcgggctgtgaccttttccctttgcccatacctatagggaggaatgcccccacccccgctgcactgcgcctcagtgcttaaccttggcccaggggacactttcaaaccagctgcaggccccagctttgggtttgccctctcagaggcagggactgccctgcattttgctgtttaaaaaaaaaaaatttttttttaaaaagagccagatgcagtggctcacacatgtaatcccagcattttaggaggccgaggcaggtggatcacctgagatcaggagttcaagaccagcctgaccaacatgatgaaaccccatctctactaaaaatacaaaaattagccgggcatggtggtgggtacctgtaatcccagctacctgggaggctgaggcaggagaatcacttgaacccgggaggtagaggttgcagtgagctgagatcgtaccactgcactccagcccagggaacagagtgagattccatctcaaaaaaaaaaaattaattaattaatttttaaaaaaaacagttctctttttcccagtgtttttcttgctggagaattctttgccagccggccagagggcctcctcagagtcacccacgacgtagtgctttcaattgactctgcagaggccttgccgaatgccttttctctaaataatcattctcaaccactgcagaccctcagaatcacaggggaggctgcaaaaactactcatgtccccacatcggacgtgccagcatgctgtgccccacttagaggctgtgttctctatgctgtcgcatctcaccagcctgccaccttgcagcaggtagcacacaccaggggcagccattatctggtcaagaagccagcattcctgctgaccagctggatgtttgctggagaaggaccagaaactactaacacgaaacagcacttgtttcttcccacagtcccaaaccatctgccactcagaactggcctgatttgcacccagcacctgctaacagaaagccccttaagggcagcctcgcctcctgtcctcctgcctccctccactcgtttctggcacactggcaagtgtgagcattgacaagaatgaccgggctaaggagacctgtcctgtttcaagacagagacattctggctgggtgcagtggctcacacctgtaatcccagcaccttgggaggctgaggcaggtggatcacctgaggtcagaagttcaagatcagcctggccaacatggtgaaaccccatctctactaaaaatacaaaaagtggccgggcatggtggcatgtgcctgtaatccctgctactcaggaggcgtggcaggagaattgcttgaatccaggaggtgaatgttgcagtgagctgagatcacgccaaggcactccagcctgggtgacagagcgagactctgtctcaaaaaaaaaaaaaagacagagacagaggcattccccagagtataaaagattcaccccctgcccagcctgtagtcctagctactcaggaggctgagatgggaggatggcttgaggccaaggcagcctgcgcaatatagcaaaacccatctccattaattttttgaaactttaaaaaaaaaaaaaaaaaactaagatctcactctgtcacccaggctgcagtagagcagtgcaatcctagctcaccacagccccaaactcctgagctcaagtgattctcccacctcagcctcccaagtagctgggaccacaggcgcacaccaccaagcctggctttttcttttttttttttgaaatggagtctcactctttcacccaggctggagtgaagtggcacaatctcagctcactgcgacctatgccccccaggttcaatgaattctcctgcctcagcctcccaagtaactgggattacaggtacacaccaccatgcctggctaattttatatttttagtagagacaggatttcaccgtgttggccaggctggtctcgaacccctgacctcaggtgatccacccgccttggcctcccaaagtgctgagattacaggcgtgaaccactgtgcctggcctattttcttattttttatagagacagggtctcactatgttgctcaggctggccttgaactcctgggctcaagcaatcctccccgctcaggcttccaaagtgctgggattacaggtctgagccaccatgcttcaccagctcttttaattaaaaaaaattcaccccaacttctgtggtcccagtgcgtctcacctgccccatcaccacagccatgaaaactgcccggaaattcctcaggtcaggggcctgcagctccgccacaatgccagcatccagcagcaccagtcgcagcgggcagagggaagatggcacggccaccaccagagtgtcacagatgtccgcctgctgcagctgcgcctcctgactcgaggacaggccgttggcaccctgaaccagga

SEQ ID NO: 211 - DNA, 621 bp, Homo sapiens
actttttcttcccttgcattttagaataggctggtatctcatttgaacgggggagcagacttgatctcaaatgaagctgtgcccaggagccaggcttagcatattgagatttttatagataccttaaaaaataaaatatttaaacctctcttttcttcctttttctatgaaataggttttttctctagtttacaaatgacatgaaaataggttttatttgtgttttatctgctttattttttgatgcttagacaacagttagacttactgagctcctaaaaaaacgaggaagaagtccttatttgtgaaaagcactttatgagtaattgtatagacagtatgtggctgcgtcactgatcatcttgtaagggtgtaacagtcttgtctgtaaagtggctgcagtgccttctgtagtgtgttttatttttggtagggagaggtgaagccttctgaaaaatttgagagcaactacagaggattgtttgtaactgtgtagtattcctgatggacttttttcatcgttagagtcaaggacctagacttttgccactgaaataatattgaccaaaaaaatagtttataaaagggatttgtgaatagaaaattcagtgtgatcatttg

SEQ ID NO: 212 - DNA, 583 bp, Homo sapiens
ggcatactggggcattttagaagataaaatcccatacaaatgatatatgctatatttatgttggtgttggagaagaaagagcagtatataaagaaataattcaagactgcagcactgtcaacctgaaactttgtaaatatttcctagcttctggtttggtgcggtgacagcactttcatcacaggatgttaccttgtattcaccaggcggagtgcgagctgctgcacatcctcctcagatctcacctgtccccactgtacatccacccgccagctgcttgcaaacctcatctctagctttagttcgaaaccacattgcagggttcaggtgacctctacaaaaaactacctcttcagaatgaggtaatgaatagttatttattttaaaatatgaaaagtcaggagctctagaacatgacgatgatttaagattttaacttttttgtgtacttgtatttgagcactctcattttgtcctaaagggcattatacatttaagcagtaatactgtaaaaaaatgtgttgctcggaatatctgaatgttgttgaaagtggtgccagaaccggtttaggggtacgtttca

SEQ ID NO: 213 - DNA, 448 bp, Homo sapiens
attgttatttaaaaatttcagattgtaactccaggccctgctgtctatattgcagccactaaaagctcactaccattagatttttgctaacatacatgtattcagaagaaagcctattgaaattttcattgtcttgtaaaaggttgtcctagtaaaatggaaaagatccttaagttattaatcagtttgaaaagcaaatttgtttttaagttttacatcagcagggcagtgtcttacaaaattcagaaattgcaaaggtggaaataattcacgctgatttgaagaacatcttctgtgcaataatactgcctctcttgaaaagcattggctgttttttctttttaaatatatctctagatgcttttaaatgtggctgtgttccctttaccaagattggcttcaagtttccgcaggtagagagacctgggcttgaacaagaggatgtgtt

SEQ ID NO: 214 - DNA, 481 bp, Homo sapiens
aagaaagtcaaacctactttacagtaaaatacttggtaagtgagttagaaaaatgatctttttctcagtgagaagtgctattctgtggcattttgaaaaataatcttacttctgctccactgaagaaatctggttattaaaagagttattccttttataaaatcaaaatctgcatgtggcaatttttattcattgatatggctctcttctcaaaacacaaagaacaaatctaacttttcactcaaaaattaatcttaaagacacaatttatgctcttcctgtaagcagcctgagatgatctcttaaaatggtttactattcacttgacccagaacaacccaaaaaatcattcaaatcaagagattgaaatcttcgtgttcactttaagaacatccatgaagctacccaggcaatcaagggttatgtatatctgaaaagccaccaagtatctgaaagatgtgactttacagaagcagtgtgt

SEQ ID NO: 215 - DNA, 520 bp, Homo sapiens
tgaaatgatgcttactgaaatagaacaaatttttctaagccagaggaggaggttgcatagaagaaaaaggtattccagaagaaaccgaagaaacaaaaataatgacccaggaataatttcaatataaaatatatgcaaataaaatcaaaagtagaaaaaagacaatcaaaattttaaagagcatggaagctcaattaaaatagaggagagaaccgggcacaatggctcacgcctgtaatcccagcacttcgggaggctgaggcgagtgcatcaggaggtcaggagattgagaccatcctggctaacacggtgaaaccccgtcttactaaaaatacaaaaaattagccaggcgtggtggcgggcgcctgtagtcccagctactcgggaggctgaggcaggagaatggcgtgaacccgggaggcggagcttgcagtgagccgagatcgcgccactgcactccaacctggacaacagagcaagactccatctcaaaaaaaaaaaaaaaaggaggaaagatcag

SEQ ID NO: 216 - DNA, 1577 bp, Homo sapiens
agcctcggtggtcaagaacttaaaattacactactggtgtgcaacgtgctcttatctgtgttactggaggacaccctcaagatacctcactccagttgactccttggctctaaatctttgagttaaaaaataaggaggttctttatggaataaacaggtattaagctatttaaaggagagggctgcgaaatgcttgattatgggcttttcaagttcagaggccaagcgtttgtcattttcttccagtaactaggactgtgtcttgcccctaatagttactcagactatatttgcttaattgaattaaacacagttgcctatgccctttgaaattctggactttcaacagagggcctctagcccaatatttgcttaccaaactggacatcattgatgatctggattcaggcagggtctggaaaaagagagactgggccaaattaaaataatccattcactgatgacacaaaactaaactacaattgtttggcaccctctcttctccttatcttgcaaaatcaaattaagcactagtggaaagaaacagttcagagaggaatatgggaaaggaaaaaaaaaaaccaaaatgtgatttccaacgagactagagatttgttctttatctacatggtcatgttactcatttgatagcatctatctcaggggtattatgttatctcttggccaggactcatgaaagttaagatttgcattgataggaaaagttttgcagaaatatggactcttgagagggtgggaggtatataaaagtggctatggctgtgcagcagagcaatttgcatttcttatacaccctgcttgagactgatgtcattagtgttggttaggccaaggctgggggaggctactcagaatagtgggtgaccaattacccagaacctttggaaaaggaaatgacttgattgaagaggccattctttaaatgtatcttactgctcaatttcaccattgcctattgtagaatgcgccctgcccgctcagcatttgcctctaggcagaccaggactccttcccctccccaactaatcttccttctcctgtatcttattccctagggccacttgcacctttcaaaatggataaattaaattcccctgctccccttctaccaactttaacatcatatccttggtgtatgatgccctacttttcattgttttgcctaaataagagtatgcttgggaattttaggcttagggctgggaaaagatgggatatggaatcgtcagctatagattgccggacaagaaattttaggagcagtagacctttcaaccgccctcaataggatggaactgactgtccccacaacctatttccctttcagtggcttgctccagccaaggccccttatttaagagatctttgtgcgctctgaaaaccatgcatatgccagaactaggtgctctgtttcatgaaggcagtttgataactgaatggactttggaagtgcccagtgtttgactattaccctggtgcgatgatcacactgggcgtatcattgtcacatgatcccatgtttgttgatgaaaataaacagtggttttcaaaaacca

SEQ ID NO: 217 - DNA, 1577 bp, Homo sapiens; identical to SEQ ID NO: 216

SEQ ID NO: 218 - DNA, 412 bp, Homo sapiens
ctataattgaatttactcatctatataaaacagtacttttaatcccatcctgaaaatcaaaatatatttttgaaaatcaaaatatgtcaaaattgaaaatcaaaatgtcaaaatattgaaaattgaaatatatcaaaattaattatatttgatgtatccctcaaaaaattgatttctccttacagaaatcattttgctttcctggaaaaacactgggttcaagtgcagctttcttcattccgttctggtctgtccagtatatgaaaagcacaagcacacaatgaccagtgacagattcaccatgaagctaatgaagcttcatggggcccttcccttgtgcagaagtccttccagtgcttggggaagggccgaagcaattttattctcataatttgtaatattttccttagag

SEQ ID NO: 219 - DNA, 490 bp, Homo sapiens
tgtgtaacttttcccctattcagatatattgttaggaaaatctcattaacctttcatgtattttgatgactatctcaagatggtagttcttctgtttagctaaactagtaagagtagaatcagttaatagaaaaaggaaacttatggcataaagccatatggtaataaggacaatgagttttctgatttgaaaataggtctttgatacctcaacaataatatacctggattcaattctttacagtataaaaaaaaccttgcacatttgttaggttcgagccacatgcacctgactactgctattattatcctctttattttagagatgaggaaaataaagtccagagaggttaaacattttgccctaagaccccacagcaagtgggtagaagacctgggactataatgcaggttttctggcctctagttcagagcattcgtagcatgctagcccctcagtagcatagtactttaggaagctagtctttcc

SEQ ID NO: 220 - DNA, 1680 bp, Homo sapiens
gaagaaactcagactatgtggcaaacccaaaagtcacttcatgtgaggttgctgaagcaccattcagcatctggatcctgattctccttttaagctaaaatctcatcaaggcttcaataagaagatggatatggatatatagtatattctactcctgtaaggaaaatggtatttggaattccgaattgacaggttatctggaacaaaggagcttctttttttttctaggttttgcaggcatgaaatagtgattatatctgtggaaaagcataggaaggcattctcctttttcatttttttcctttggctggcagctcttcccagtgatgttgagagcacctgcagcaatctggtccccagtcgcacaacttcccacatacccagaggagagcatatgcctgtgggggcagtgctgatggcatccagagtcattgctgtggctgagctggaaggaaatcaccaggtgccaccgtcaatatttatcagctttcagcactggttttgttagacagtcagggtgtattatttcaagagcttcaataaaaaaagtgtttgcaggtatttgtcatatttctttagtatgcaataatgctatcttatcctttttagtgctatttctcaggttttctcagtcaaccagctagatgcatgtgatgcatgtctgtccttcactttttttttttcatttctggattttcctgggatttctgacaacacaaaagtagaaagtgcttggtatttctgtcttatacataggaaaacatttaaaataaatagtttttaattgtaggctcaacatctgttaccccatagctttttcgtatattgtttctttccctttgaatttctttttactgtcatctattattttaacaggagttaaaataactcctgttaaactttctgacaatatcataagaattcatattaaaggtgttattctttctggttgtgagattctagcacaaaggcctaaaatcatcaaattagatttccatttgtaaacaaattctaatgggcaaaatatcttgagagcagtttttatatggattatccataaaatgacctttacatatccctgcagagttggccttttgcccgtggtgtgctagtagctttggctgatgctaagctttcctggtatgcgccctatttttaagaagtaattgcttttgaattaagttatagcattactaattcatgttaatgactaggaaaccctctgtaatttacaagatttttcaaattggtggggagtgaataaatacaatttaaaagagtcagaaatcagtttggcaaagtgtactttcttaatttctatttatgatgaagtatagtcataatttatttgtaatactactttatggtataccagtgaaagaactgtagtataaaaaagaggtattaatgttttatgaaatctcatgcatcagttcatagcataaaatctagctggacaactaagaagctatggtagcaaacagtgatgttgatggaatgagaatcatgaactttcatattacctcaaaggatttttttatcagtttttttcacacatcagaaaaaactgactgtataaacacttatcactgacctttttctatgtgtagttttgccttttatcttttcccaaatttttataaagagaaattaataaatattttattacaacattgtaaa

SEQ ID NO: 221 - DNA, 1678 bp, Homo sapiens
gaagaaactcagactatgtggcaaacccaaaagtcacttcatgtgaggttgctgaagcaccattcagcatctggatcctgattctccttttaagctaaaatctcatcaaggcttcaataagaagatggatatggatatatagtatattctactcctgtaaggaaaatggtatttggaattccgaattgacaggttatctggaacaaaggagcttctttttttttctaggttttgcaggcatgaaatagtgattatatctgtggaaaagcataggaaggcattctcctttttcatttttttcctttggctggcagctcttcccagtgatgttgagagcacctgcagcaatctggtccccagtcgcacaacttcccacatacccagaggagagcatatgcctgtgggggcagtgctgatggcatccagagtcattgctgtggctgagctggaaggaaatcaccaggtgccaccgtcaatatttatcagctttcagcactggttttgttagacagtcagggtgtattatttcaagagcttcaataaaaaaagtgtttgcaggtatttgtcatatttctttagtatgcaataatgctatcttatcctttttagtgctatttctcaggttttctcagtcaaccagctagatgcatgtgatgcatgtctatccttcactttttttttttcatttctggattttcctgggatttctgacaacacaaaagtagaaagtgcttggtatttctgtcttatacataggaaaacatttaaaataaatagtttttaattgtaggctcaacatctgttaccccatagctttttcgtatattgtttctttccctttgaatttctttttactgtcatctattattttaacaggagttaaaataactcctgttaaactttctgacaatatcataagaattcatattaaaggtgttattctttctggttgtgagattctagcacaaaggcctaaaatcatcaaattagatttccatttgtaaacaaattctaatgggcaaaatatcttgagagcagtttttatatggattatccataaaatgacctttacatatccctgcagagttggccttttgcccgtggtgtgctagtagctttggctgatgctaagctttcctggtatgcgccctatttttaagaagtaattgcttttgaattaagttatagcattactaattcatgttaatgactaggaaaccctctgtaatttacaagatttttcaaattggtggggagtgaataaatacaatttaaaagtcagaaatcagtttggcaaagtgtactttcttaatttctatttatgatgaagtatagtcataatttatttgtaatactactttatggtataccagtgaaagaactgtagtataaaaaagaggtattaatgttttatgaaatctcatgcatcagttcatagcataaaatctagctggacaactaagaagctatggtagcaaacagtgatgttgatggaatgagaatcatgaactttcatattacctcaaaggatttttttatcagtttttttcacacatcagaaaaaactgactgtataaacacttatcactgacctttttctatgtgtagttttgccttttatcttttcccaaatttttataaagagaaattaataaatattttattacaacattgtaaa

SEQ ID NO: 222 - DNA, 381 bp, Homo sapiens
taggctccccacgtgatgtccactgacatcctccaggtatggacagaagtaccagcttccctcctcagccttccctgacaccatgacagtggaggggagggcatagccggggagttagagtgccccattatagcctggtgaggatggaagtctgggctccccactcagcctatgctggaataggtaggggtggagccacattttttctgtggtgtttggctgaagtagatcagttaatatctaaacattttctgtctttctggctgcccctttccttgtctgtcccttagctgcgagcataggctcttgtggtggtggtattattgttttttggggatttctttttggtctgtgcccagtggcatttccaggttgctgctg

SEQ ID NO: 223 - DNA, 240 bp, Homo sapiens
atgaaaaacttattacaaatttcagccaactcagatattaagaacatcagtgtcaatcctcctcccctcctgcgacctttttacacttgttttggtggactaggggctccttttctcctcctttttgacatataactgtgccattaaaaacatgatttctgatgaagctggcctagagggaatgaaggagattgcgtgggtatggtctctaggacaggcgtagctgttgcagggccaccc

SEQ ID NO: 224 - DNA, 240 bp, Homo sapiens; identical to SEQ ID NO: 223

SEQ ID NO: 225 - DNA, 381 bp, Homo sapiens; identical to SEQ ID NO: 222

SEQ ID NO: 226 - DNA, 606 bp, Homo sapiens
caaatgctatcatgaacgtaggaaacttgatttttttgttttgatcatggcctctacatgcacctttccagagtggtctcttctcaggccctttttagtccctttccaaagctgcccccaccaccctgctcctctggcctcagtgcacagtggcccccagcctcggccaggcctgctctgctcagcgcccaccgcccaccacccctcctgcttccccgagcctgaccctgttccgcccactggcaatcagggctgcgcacttccctgtccacggtccccaggccttcctgtcttgtcccttttgatcattattaactcagggtttcagctccaacctcgctgagttggtgcagctccaggtcattcctggggtgggaatcggatcatccctgactcagcttttaccttaattttatttgcagaggattcttttctcaaaatgctctggcatttggacacacatcacatgtcgatatttgcataggagtcattttcagtggaataacatttttaatgtgtggttttacggttcaaggaactacttgatgattttgaggaaacacttgccagaaactaaattaacgaataaaagatttcagtgcccga

SEQ ID NO: 227 - DNA, 3966 bp, Homo sapiens
atctgaatagccagtttccaggcacccagcggcttcccaatacctgtaacttttccatccggggaccccggcttcaaggtgatggcccctcaccctggtctttccgagtgtgagcacagctccctcggtgcgtggattctggtccgagccagtgactcccactcgccctgccctgagcatgacacagctcgggctgtcagagggccttgctggggttgccaagagcaggctcgggtggctgtgctgtggtccacagggctctccgcgctggcccctcctctccctgacgtggctcattttgctgctgctgggatgtggactgtggcaaactctcgtgtctggcattagcgccaccccaaaagccgtcagggaaggaagcaacattaaattctagacatttgtctattttgttggcagttttaattaaatatttgagtgagggaaaggggaggtgatcagttttaaaaactggcagaggctgggcacagtggctcgtgcctgtaatcctagcacttttggaggctgaggcaggctgatcacaaggtcaagagattgagtccagcctggccaacatggagaaaccccatctctaccaaaaactacaaaaaattagccaggcatagtggtgtgcacctgtagtcccagctacttgggaggctgaggcaggagaattgcttgaacctggaggttgcagtgagccataattgagccactgcactccagcttgggtgacagagtgagtgagactctgtctcaaacaaacaaaaaacaacaaaaataactggcagagtaaggatcaagtgcaaatctggatttcctgcaacatctgcctcggctaggagcagttaggatcacccccgtcccagatgcacctaaaacctggtctgccctgactccctgagagtggaagtccaggtgattgaccagccgcatgtcatttgggaggaggttatagtggccctgagatcacgatgagctgcatctgtaaacaagtttttgacttcttagaagatgaaagtgttgcttctttcttcttcctggatcacgcagagaaacccagcagtcgtgtttggcccatgaagaagaacacgtgggtaaccgtcatgatggctgcgttcatgagaacctgggctgacatgcgttcttgtgggcagtgaagcctgggtctccttgaccatctcaaattcctcaccatggaaaggagagttctctgtcaacgttccccttgttctggggtcagactttgtgttcagtgacaacctgtgttactttaaatgagacagaggttctcattttatttatttattttttgattcagggtctcactctgtcgtcacccaggctggagtgctgtggcgcaatcacagcccactgtagccttgaccttctgggttcaagtgatcctcctgcctcagcctccctagtagctgggactacaggcatgcaccaccacacctggataacttttttttttttttttgagatggagtttcactcttattgcccaggcttgagtacagtggtatgatctcggctcaccacaacctccacctcctgggttcaagcgattctcctgcctcagcgtccagagtagctgggattacaggtgcctgccaccacgctgggctaatttttgtattttaagtagacacggggtgttgccatgttggcaaggctggtctcgaactcctgacctcaggcgatccacccaccttggccccccaaagtgctgggattacaggcatgagccactatgcccggccttggctaatttttaaaaaatattttgtagagatagggtttccctgtgttgcccaggctggtctcaaactcctggctcaagcagtccttctaccttggcctcccaaagtgctgggattacaggtgtaagccactgcacctggctgaaattctcaggttaattacatcagcagtcattaatggctgtgcttgtgaaagaagagggaaatgccttctggcttaatagaactcccacgtgtctctaccatccagaacacaggtggagacgtgatattgccggggctgccagcttgtaaggaaggagcgggtcaggactccaggtgtcttagcaggcagttgattacaaatgcgattttcaaggccagctttgtgaggcagaatagtgtctgcgtttgtgcagccaagggagaaaggaagcgttttcttcggctcctgctgtgagatctctccccagctgccagaatggccagtgctggaattccaccaggtggcacagagggagggaagcagcctgcgcccagcaggaccccgggaagggacagaagggcaacctggctggagccccatctcaggggcatgtgctctgtctccgcaggccacgtggtgcttgcgcagtgccgagtgctgatggccagtgtgggggccgcgtgccactcggaccacggggaccagtaagtgctcttcacaaacccagtccagggcataggggtcctccgggcactgggtgtggtgggcaggcggcaggatccggccactgggccgcactctggctggtgaaggacagccctgtctgggccctaggaggggcagagggagggcttcctggaagaagtgacttccaagctgccatctgaaggactaggacttgtgcgggagaagagggcttctcgtgctcagttctgaaggcggagggagggcagggcctggaggccagcgtggccggggctggggagggctggggcgggctggggtgggctggggtggggatggcctgagtgtcagtgcttacttaaacctcatggaagtgggagccctgagggccatggtgtgagcagactcaggtgtcagatcagccatctgcaagatgcagcagagattctcagatagcagggcccgggtgagcgggtgggctgcctggcggagactgtggggtagagggcgtggggtgcccgagcagcggcctgctggcagcaggggagaagtggttctgggtctggtctgctgaaaacgtgaggcccctgtgggaggtcggagtggacgcaggaggaacactcagggttctggggagagagcggaactgtagccagcagcacgtggccatcaaggtcagggcagagggattgtgcaggagcacctggagcgagacagtggtgggcctggctccagggaaaaggaggggcaggatggggccctttgttggggggacagtgccctgctgcaggaggggcaggggaggaaagggacccgggtgtgatgaggtcaggccccttgacagagcccacatctcgagcctccaacagccttgcttcaggatgtccccacgcagtcatctgttcatggctagatactgactgggtccctagtgtctgcaaagccccatgctaggtgccatgaagttaccaagtggctcaggtgggccgcatgggtaaggcactgtctgtgtcggcatccgtgttctccaggacctcagacccctcaaggacaggagagcccctggccccagagctcagtgcgagagggaggcagtgtcacctgggagtgccaagtgcaagagaactctgcagggagaacgggggcgactttgagccacaccttgatgtgggtgatcttaggggtgtgcttggtctgggagtttagcaggaggtggatgccaggcgaggcaggcgcacatccgggtgggcagagcccactaggggagtggtccagagcagggggggctgtgtctcttccatgtgccctcagcagcagctgcagctcggtctcgccctccccaggccgtccccagtgctgctgagctacggtgtccccttcgacgtggccaggaacgcgctccggctcagcgtgggccgcagcaccaccagggccgaggtggacctcgtcgtgcaggacctgaagcaggccgtggcgcagctggaggaccaggcctagcactggggccgccttccccaccccgcttctgggaagcccgtggcagggcacagggtt

SEQ ID NO: 228 - DNA, 1784 bp, Homo sapiens
atctgtgtgtgtaagaggaaacatataaatacacatttctcatttgccaattacaccttccctggtataaggggaagaaaacgacttggcatctgatgtggggagaattattgctaagacctggaggcagggtacttcttactgcttcaggcctgaatttaggtggtcatttggggtgtgcaggacagagcacctcctaaggacctgagagtccagtcagtggggaggcccagctcccccaccaactgtgtgaggacagatcacccacttcctcacttggggctctggttttctcttcttactacccgattccaatgcctattgtgtcttttaaatcctctgttttaaaaatgaatcttaagctctctcggagggtccaccaggccgtgcacctctattcccagtgacaaatgacaccccttccaggctagtctcaggatccagtaggattccctttgctgatctgtgcctttgacctctgctctgccacttctgttttacctgcaaggggcatgacatacagggtagtaattatgaagttctcccaggcagttccaccaaagtcccacattgtacaagggaaggcatacacagttttaactacctagccaggggcagctggcctttccccaggccctttaaaacacctgtttgaccagcctgtgggtcctttcccatcggggttccagcttgagtcctgctggtagcccttggcacaaggcctggtaggcagcctggtgctgccatgtaccaaactctgctggggaaacctcagccacagcagatgcaaacccattaggtatagcatggttcaagatatttttgcttgtttcaataacacttttgttcttgattttaagggctattttagaaactgctttaaaatatttttgaaagtataaagaggtgaataaaacatactcctgttccactgtgcaaagatagtcactgttaatgtttctttccagtcgttttctatgcatagtttagccatgacttctcatggggacaaacccactggtttaattcaacccccaatgtcaggtttttataggtcagcccagagttctcaagcccagtcacaaagcagagccaggactcaaattcacaccctgtgactgagctgtttccactgtaccatgagacactacccacaaatcgctccttctccagtatctatgacacgaccataacaaaccataccccttggacagatattccttaaaaaaaaaaaaagtttcagaaatagccaaccaaatacaaaaagtttggatgttttactttagcagtggtgtggagactctggtgtgctcttgtatagaagcgtagcatgcagctaaacccagtgccctggaaaccttctttgcagagcatctgtggacaggggttctggaacatgctctgggagacatggtactttgcagtttgtggcagaccccaggcctgtgtccttagatctggcaagggaaaggcaagtctttggtggagatgtatagctagaaaggggcccctcttctaggaaaagaaaaacacagttccttaaaaactaatctaattctgccacaaataaacaggatccgttattcacacagtgaggccatcctcagcagggagaagacaatggcagagtggagatgctggtcaggttgcttagcagatcatttaaagcagttgctttcctagtagctttgtcctgaattgggtttgggagatttagagaatacatcatagtagagacaaatacatcatattggtgtgcaagtcgataattagcacaccagtcg

SEQ ID NO: 229 - DNA, 460 bp, Homo sapiens
  SITE (70): n equals a,t,g, or c
  SITE (217): n equals a,t,g, or c
gttttttttccccacttgaatcatgtatactgaaaacccatttcctcagcaactacacaaaataagaganaaggaagtgctatatgccagatacaaatgactcaaaggcagctcagttgtactggttttgaaaactcaaggattttataaataaaaatatttaagtatttccagttatgtaaacactctaaaattctataattttttggaaaaaaanagctatagctttattgtttttacattcacctttataatgtctgtctgtttcaacacaatgaaggtatatggaatgtgcaatttacaaacctaaaatatatgtgccaaaaattaacgcttttttgttagtactaattacttcatggacacaaacaagataaaggaaatataaagcattactgttgctacattttcctttgtaatcacttctgtttttaatacaataaaggaatgtaaaattcaa

SEQ ID NO: 230 - DNA, 460 bp, Homo sapiens
gttttttttccccacttgaatcatgtatactgaaaacccatttcctcagcaactacacaaaataagagaaagggaagtgctatattccagatacaaatgactcaaaggcagctcagttgtactggttttgaaaactcaaggattttataaataaaaatatttaagtatttccagttatgtaaacactctaaaattctataattttttggaaaaaaaaagctatagctttattgtttttacattcacctttataatgtctgtctgtttcaacacaatgaaggtatatggaatgtgcaatttacaaacctaaaatatatgtgccaaaaattaacgcttttttgttagtactaattacttcatggacacaaacaagataaaggaaatataaagcattactgttgctacattttcctttgtaatcacttctgtttttaatacaataaaggaatgtaaaattcaa

SEQ ID NO: 231 - DNA, 650 bp, Homo sapiens
  SITE (28): n equals a,t,g, or c
tttttatttttttttaaataagcactanacaggtcacaaacaattaaatagcattttcatgtcaccatgaagggtggaattggggcacttgtccctgatactttcttctctgtgataagacaaacaagatacatgccagcatcaagccttccctactagggagccacctccaccccagacacatcatgcagccagccctctcacctggctaactccaagcattgattctccctgtcaaagccaatccttattttcttctctataaactgtctagtgcaattccactataatctttactttagctttttggagttgcctattttcaaatgaaaatcattggctttgcaaatgattgcagcatgttttaggcaggttccatggtgagtgcattgtccctgcatttgcagttggacaatataacactcatttgtagagctttttaatgtaatggtgctgtgatgtcttacttagttccttgaggatttcattagtggtaactgaattacactagtagtgggaattcagcccaggatgtattctttcattaagagctgcggtgtttgacagtatgtcagggatgaagcatgcctggaaatgggaagattttttaaagctctgtattcctcactcacttttctttctttctctct

SEQ ID NO: 232 - DNA, 651 bp, Homo sapiens
tttttatttttttttaaataagcactaaacaggtcacaaacaattaaatagcattttcatgtcaccatgaagggtggaattggggcacttgtccctgatactttcttctctgtgataagacaaacaagatacatgccagcatcaagccttccctactagggagccacctccaccccaagacacatcatgcagccagccctctcacctggctaactccaagcattgattctccctgtcaaagccaatccttattttcttctctataaactgtctagtgcaattccactataatctttactttagctttttggagttgcctattttcaaatgaaaatcattggctttgcaaatgattgcagcatgttttaggcaggttccatggtgagtgcattgtccctgcatttgcagttggacaatataacactcatttgtagagctttttaatgtaatggtgctgtgatgtcttacttagttccttgaggatttcattagtggtaactgaattacactagtagtgggaattcagcccaggatgtattctttcattaagagctgcggtgtttgacagtatgtcagggatgaagcatgcctggaaatgggaagattttttaaagctctgtattcctcactcacttttctttctttctctct

SEQ ID NO: 233 - DNA, 285 bp, Homo sapiens
gtgtatatgtgccacattttgttaatccagtctatcattgatgaacatttcagttggtcccaagtctttgctattgtgaatagtgctgcaacaaacatacgtgtgcatgtgtctttatagtagcatgatttataatcctttgggtatacacccagtaatgggatggctgggtcaaatggtatttctagttctagatccttgaggaatcgccacgctgtcatccacaatggttgaactaatttacactcccaccaacaatgtaaaagcattcctatttctccacat

SEQ ID NO: 234 - DNA, 7221 bp, Homo sapiens
gaaaactttgtatcaaatgtattttcagcaagacttgaagatttgacacaggcacagggaaaaggaacaaacttaaaaagagtataaataaggtcagttcaaactcacttctatttgaaatgtgttttaaaaacaattttagtcttatattttaaaaatatgattgagaatttttttttctttaattcaagtcttctcaatcatcttaaaatacttgtgagctgaactgatacattaaggcaaatttttattttaaatactcatttcattgatgaactctgtttcatttaaactgctaatccagggagaaagttttcgtaaaaaacattttattgctacaaagggaaacatggtcacaaagagcctttaagcgtatcttaacgcaaattactattcaatgtctaatgcagtaaaaaaatacacagagcacaaaatacttgcccagtttatatcttccagggtaagtattcaaaaaattgatgcacacttgaatattcactcccaagagcagcatttaagataaaatgattagaatagatatactaacaatacacatttgttatccttaacaccaataaagtaataaaaattaagcttaaaaattatacaaacaatttatcggatctaagtctggtagctataaaaactaaactaaaatagttttgccttcattttattaaacaaatgttaaacatttagaaattatataaaacaaattttaatatgtggaatgcatgcaacatgggtgttaattcatattttaagctattaaatttcttacccttttttacattagaaccgaaatgtaaagctccttttaaatctaataccttatatttaattttcttcaggttgctcaacagggaagtcagcaggttcttcctttgctgtctcttcctctaattcctctacttcctctacttcccccactccctctacttctcccactacccctacttcccctccttcccctactccctgtatatttccctcgccctctattcctccttctctcacttcctctacttcttccacttcctctacttcccccacttcctctgcttcttcttcctcatcttcatcctcctcttcttcaataggttcatcaatcttctcttcatcctcctcatctccttctatttgctgatcctgagaatggtcttgaatttcaaaaggattctcaccctaaaaacataagaaatggctttcaaaatcagcacattcattattacatgatctggcaagtgaaatttttacttgccatatcatgagaaataaatgccattttgaaacttttcattgtaaattataacaaattcattaagtatttgttgactgtccattccataccaatgtgagcatataatttactgaagccattactttatcctccataactgaaatgcttaaaggtcatattttccccttaactgtatttctaaataatcatacacacacacacacacacacacatatatacacatgacaaagacaagtgtggtttttggtagaaacaaagggatgatgcaaagatttacattttgcttaattatatgagtattaatgttacagaatctctttaaaactcaaatgaaaatcaggtacctcgcttaatctactagataccatgccttacttctacttttaaaaagtagacaaacctctcagtaaacattcacaggaacaactttaatattttattttaatacttcaattatatatctggatcaaatctcatataaatttgaccatatcagaaggctatattaatgtagtaagaaatgaagtaacagtgaaggttattaagcaggaaaatattaagattggcactaccctttaagatgaatgacacaggaatgtgtaggatgaagcagagaaccaaaagaaggaatactagtgaggaggctactctaatatcccagaccagggaaatgtaaaagatgtggtgacattattcacagaacaggtaaattacaatcactattccaacggaaaggaaaaggggaggaagtgtatatatgctattaatatatataattataacttcagatatctagatgtctaataggcagctataaatttgcaactcaaaagagaggagagttcagaataagatatttacatttacgaattgcctgcttgcagagagtgcattggtgaagccagggtcttaaatgggaaggccctgggatgggactggtggattaagtagaaaaaagggctgcaataaaaaccctatgaagatgcctacactatacatgggagcagcagaagttagaagtgaaggaacacagctgggtgcggtggctcatacctgcaaggctgaggcgggtggatcacaaggtcaggagattgagatcatcctggctaacacggtgaaaccccgactccactaaacatacaaaatattagccaggcctggtagcaggcacctgtagtcccagctactcaggaaactgagacaggagaatggcgtgaacccaggaggtggagcctgcagtgagccaagatcgcgccactgcatggcctgggcgacacagcgagactctgtctcgaaaaaaaaaaaaaaagtgaaggaacacttggtgcaggaggaaacccaggacagtaaaaagactacctgataaaagagagtttcaagaataagtgatagatcaacagtgtcaaatgatacatataaaaaagcagaaagcaattgaaaaaggtcactagagttaatcatcaatacagaatgggggttcttgaggatttattgtactatccccttattttcatacatttaatatgttataattttttaaagaccactagatttgataatgacaacattagtaatcttaggaagagcagtttcaaaagtatgatgtgacagttagacagcagcagttgtccaagaatgtatctttaaaatttcctatgaagctgtcaaaaaccacaggccctgattccagcaccctgagattttcatttagtctgtactggaactcttgctgaaaacacaaattcctggatcaatctcagactgcctgaatcaaaatttccaggggagacgctcagtaacttgcatatttaagaagcatttcgggcaaaaattagctgggtgtggcctagctactcaggaggctgagccaggagaatcgtttgaacccgggaggtggagtatgcagtaagcccagatcacaccactgcactccagcctgggcaacagagtgagactctgtctcaaaataagagaagcatttttggagatatttatcagtgaagtttgggaaaccctaattcagaaagcctaaaaaagggcttaggcagctttttgtttatcttagcctcacgggtgattgaacacattcctctggttgagaactactagtttaaagagtgaataatagagaggaagcaaagagcacgtgcaaagtaaactaccatttcaagtatgctgggaagagacaagatgataaaatagggtgggccaaagtctaggaaaagttaagtcatttttggtttagggaactcataagcatgtctatttgaggaagattagaaaaaaaaaaaaaaaaacaggaaaaaaatcagatgcaagtaagggaagaaataatgatggaattagaacaaagatgaaaggcaaagaagatttttcctcacaaataataaaggtgaaggaaagatatatctaaggcagaaatgagaacacttactgaatttacatctaatggtctcaatctccctaatgcaggagaagaaataagcatatgggaagtggctgagtgtggtggtgtgtgcctgtaatcccagctactagagaggccgaggtgggagaatggctttaaacccaggagttcaaggctgcagtgagctattatcgcaccactgaactctggcctgggcaacacaaaaagattctgtcttaaaatatatatatataagaaaaagaatatgggaagcaaagagagcaagaatgaaatctgagacatgaggttattaaaggttggaagagtcactacaggaaacacattacactggtagttaataagtaaaattattgtgaattgagtgaaaatctgggaaacacaggactggcacgcacaattccacattttttagcaagacaaacattaaagctaaccgtagagctagaactaataaggaatttgagagcggcaacattccctactgaaaggggtgattatcaatgcccagagcagggagtgaaggcagaacaagatgatacagttggagaattaagagaaattgatgtactgattatctcaatgaggacaaagttgttttgttttgtttttttgtcttctctgccgtgtctctaagggacaaagatttaaaagggcattttatcagactgagagcacttgacagtggagggacagtggaggagttttaagccatgaccagagctgaccatgagcagaagatgttctggggaatgacaacagggaacacagcagacaggcatgctgaataaagggccatcattgagtaatgtgaccccagtgcttcttgaattttcacatgcatacaaatcaacaggaatcttgttaaaatgaagattcttattcagtaggcctgggtatgacctgaaattctgcatttctaatgagctcccaagtgatgccaatactgctgatccacagatcacattctgagtaacaaagttctagaggagttctcagttcaggtgtgttctctacaacatgtgcatgagcaggatactcccaccagtgacatctctcattccatgaagtgactcgattgtgtaacttgaaaacactatatagaaattctaattttgcattcttccctcattaaaaattatcttcatacatcaatagaaaccactttctcagaagtttgtgacaatgcaagaataaaaatctaatttttccttctttagctatgatgcttctttttgatgccatacctctcataaaattggatttcaattgagggctgcattcatttttttaaagtagtgtcaagaatgtagtaaatggcgacaaatattaacgaatattagattaacaaattagaaaataggcccctaaggaacgagctgcaagaactaatattatttagcttggaaaggactggtagagggacaatttaatggtcactaaatatgtatcaggttttcttcacagagtagctgttaagagtcacaatagacaaaataaacaaaacttctttaatctatacttactaatgtaaataacacactgttgtaaatcctcaacacaacagctctcttcagtgtagaataatgattttaaggtaggtattattttgtaaagactgaaaaataacttctatcagaccagtctgggtattataagagaagtaaaaacacaacaaaaccaaaagactaacctctaaaatttattcccaaatcacagtaagctcttatttgtatagtaagtgtttatcataaattttatgtaaagatggattcaagccataacatatggcaaaaaccctgaggagtaaagagtatatatccaattgttcacatctgagtttcataatattagaagcaaacctctcttctcccgcccgccaaattccatgagattccttcttctggagaaacatctgaccttcctgctaccctccaacttttatgcagggaaaaggaatgatttatgcaattagtatgcttggaagaaaaaactaggtggacacaacacagtcccttgtgggtcccctcttttgggtcttcctagtgacagaaaaggtacatcctagtctgttctatgccatgtggtaaactaggagaagcctgttgctgtccatctgggctggtaacagaaattgggaggatctaagtctacctaattcagaaatgaaatattaaaagtccacagcaactacatagctaagatatattctccaagtcaattttttcttaaatcaagaataaagctgacattttgattttctatctaatgcttgtgtatttctcattgattcagagctacaaaggtgataagagaggaatcactgctcccatcttgaccaacccaacaattaggaaaaaagatgttttacctatatgcaagatactgagtaaaattcttcttaatatgttatactatattcaagtatcacaaaaggttactatgtcaccagttaattattgcaatactacaatattattgaaaaggtttttgccctaaaatcttaccttaacaaaacgttcatatcgcgccttcactattggattatttaaaatgcttgtagcagtcaagacactctctctttttatttgttccttataagcctataaaaaacagaacacactgagggttcttgaaaaccatgccatgaaaaatatttccataattaaaacagcatttcatgctcaaacccttagatttaaatgacttatcttcttacaaactatagagcaatagcaactactataaccacagtctaaatctatgaattcaaacaatgaagattcaagccaatcagcttcaaaagaaaacactcagtcccacaaatctacaagtctagattctactagatagctgccttctcttctttccactccacatctgcctccccagcccccaactattaattttcacgctgtcaaaaaataaagaataatttttcatactacaagagtatctagtcttcctctaggctgtagttatttcaagactattatacagaggaagaaagttaccagtatagaaaattgccaaaatggtgtcaagggaatatcaagagaagaaaaagacatagattaagaaaagattgtatgtgttcaaaaatgcttgaagaaatctgaattaaatgaggttcacttcaatacaaaataaaagtttaacacttgggtatgttctatttaaaacttaaggctttaatatctgaatctttaaatatgcttttcaaacaaactgatttcccacaatataaacatttgtattgtctgaagtaaatctgactaaataaaaccagccaagccaatagagaagcagaaatatactgaccaaaaagaagacagtaaatttttcagggatattctactaaaaaatgtaagaatagatgctagctgataatgctgtttttaaatgtatttttcccaaccatcagaaaaatgtatcagtaataatcaaatctttactttcttttttattctaaaacacagacacacacaacacacacacactctctcacaaaactgttttgtactgactttttaaa

SEQ ID NO: 235 - DNA, 427 bp, Homo sapiens
aacagaagttgaaaggcgtttaagatcttatatacatccttattacaaaagcaatgcaaatataaacactaaggatcacaaaaactaacctgactataaagtaaactgcccgcctacaaattatccaataggaaatacatgaatttgaatttctgaattaagcacagtaacaaaatacacttttatttatcattaccttgcaaattagctaggctgtataaaggctcatgcgtcccacaaaaaagtactatttagatgttctttcctatctctcattctaaaacatttacccagttgttacataggattcttgttacataatggttttcttcccaaaagtttcatatctcaatcagactaccagagacattgttttaaaaaaaatcactcagcttagtatcagaagaaccaaatactaataacctag

SEQ ID NO: 236 - DNA, 2866 bp, Homo sapiens
gtctacaactgacaaaatgtcttcttcaaattaaaaaaaattgagaagcagcactttaagtctaactctacaccattttattgcatgtattagttttattaatgatttttggtgcatgcctttgggcttattcaaaagtgtacaataggaaagtatatttcctttcttagaaaggagatgttttctactttgcaacatgtgattacaaaaatcttcctctgtgggaagattaaccatgtattgaactactgaaaagtatatatttttagatatacagaaggaatctacatggagcagcattcagacctatatagaagtcatagcattctgtataggaccaaaaaggaaataacattaaacacttaaacagacgttgttgggtagaaatacctttagatcttgcatttacttccaaaaagaaaaaatgccacagaagtttgctgaaaacttttgtcgtttgaattttctctgtcagtgtatttagcccaaatacaacagctttgggttagcacacacataagaatcaaaaaaacaaagctcactaaataaatcagtctggtttgccaatccagcttgactgaaataagtaaaccaatcacttgcaacatgaaaaactgtccaactcctctaaggttctgacaaaataaccttggctgatgtgggaagactcccactttgattactgacctgacagtgaagattcatgcttgacatgatttcagacttgacaatgtctgtttaaggagctatggtacagtttgctaattcaatcccagatacctgttgattacctgtgagatctagagtccaaagtagccagcagccatatccctgagtgctctgtgcccatcagatatcttaaagtaagcagggttgggacaggtcacagcttggatgattgacctcaggtgccgtagacagccccagattcaagaattgtatctgctttcttggcagtcgtcactgaactaatgtcccatactgtgttacttactgtagatgctctcttttagaggaggcccagagcacacatcctaatcgctagcggtactcagagagggggtgctaactctgatgccctggccaaattccagtttagggatgtgggtcttcttcttgtcattctaattggaaatgtgcatcacttcccatttttcttactgatctcagtgcaaactacactagtctgtttctttgccctggtctcaagtctctaagacgctggtgtgtattatgtgggctaagttcatgtgttatcctaaggcacaagagttgaggaatgggtgagcttggtgtcagagcactgtgtggttggagggtggactcttgtgatgctgtggggatgaaattggccctcttttagcataagttggggagtgtgcactggctggaggcttccagaggcttccagccatgaggtgtgagctgaaaccaatttttcctctttccttatagcatgttgagaaaatctgttgggttttcagcagtcagggaaggccggagttctgctttaatctgggtaactgaggctaatatgagcaagactttggttaattaactgggttctcagatgccacagactccgtgagaagtcaccattattttcaatggttgtgatagaatttcccccagtagccattattttaagattatattgcagagttgctttattttgagctttttgtgtatacacaatcccaaactggaagaaattttaaaaaaaggaatcctgctgtgaaaggtatatattactctagatttttcttactgtaaatattgtaagattgtaatactgtcgatattttattaaccaacaaatgttaatctatgtgaaatcagacttattttaaatgtgcttcttatttactgtgtgtggtccctgttgctgacagtattaagttatattctgatgtaagattaactttattaaagaatgtaaacattaatgtttccttatgggaaaacaaataaagtataaagaagacaattcttttcattgaaatatactgtgtatttacacttgctagacccagcaccacttataaatttagtacactgttcagaattttagttaacacagctgacatggttgtgctctgtttgaaagtctaagaataggtattgttggaatatacagtttgtatttgtctgctgtgaatcataatcttgaaatttctaatcaagtttgtaaaatttttatagtgaaacattttaatgacaatttaaaaatttatcttctctaaagaatggtcaaaacaatatcctttcagaaatagaattgttctttaatatctttccaaaatgactttggttaaatggaccagatgtatattagttaaaatttaggactaagttgttgatattctttgagtttacaagttaatccttattggagatgtgccaatatacagttagaatatcattaatttgcactgtttggggaccccatttaagaatgctgaattttgccaactaagaagtaagcaaatgcaatttaaaaagtaaatttgagcattctgtattaaatatgtgcagttattatcacatgaagaaacgcagtgtgtcgggctgtaatattaccatatttgctgtcatgttctcccatctcagtgctgggaaatcaccatgtggaaaccaagcaaacgtgttgtgcatcagccggcttgagtttgttcaatatcaaagctgaaaactagcgaggtctgctgtactgcttattgaagtattgtgattattttaggcattgattcttacaaaatatatactgtaacagtatactttgtacagatttaaattttatttgaaaaaatgaaataaagtaggcaaaaaaataaagatgtttatttttcatgtgactgtataatca

SEQ ID NO: 237 - DNA, 2866 bp, Homo sapiens
gtctacaactgacaaaatgtcttcttcaaattaaaaaaaattgagaagcagcactttaagtctaactctacaccattttattgcatgtattagttttattaatgatttttggtgcatgcctttgggcttattcaaaagtgtacaataggaaagtatatttcctttcttagaaaggagatgttttctactttgcaacatgtgattacaaaaatcttcctctgtgggaagattaaccatgtattgaactactgaaaagtatatatttttagatatacagaaggaatctacatggagcagcattcagacctatatagaagtcatagcattctgtataggaccaaaaaggaaataacattaaacacttaaacagacgttgttgggtagaaatacctttagatcttgcatttacttccaaaaagaaaaaatgccacagaagtttgctgaaaacttttgtcgtttgaattttctctgtcagtgtatttagcccaaatacaacagctttgggttagcacacacataagaatcaaaaaaccaaagctcactaaataaatcagtctggtttgccaatccagcttgactgaaataagtaaaccaatcacttgcaacatgaaaaactgtccaactcctctaaggttctgacaaaataaccttggctgatgtgggaagactcccactttgattactgacctgacagtgaagattcatgcttgacatgatttcagacttgacaatgtctgtttaaggagctatggtacagtttgctaattcaatcccagatacctgttgattacctgtgagatctagagtccaaagtagccagcagccatatccctgagtgctctgtgcccatcagatatcttaaagtaagcagggttgggacaggtcacagcttggatgattgacctcaggtgccgtagacagccccagattcaagaattgtatctgctttcttggcagtcgtcactgaactaatgtcccatactgtgttacttactgtagatgctctcttttagaggaggcccagagcacacatcctaatcgctagcggtactcagagagggggtgctaactctgatgccctggccaaattccagtttagggatgtgggtcttcttcttgtcattctaattggaaatgtgcatcacttcccatttttcttactgatctcagtgcaaactacactagtctgtttctttgccctggtctcaagtctctaagacgctggtgtgtattatgtgggctaagttcatgtgttatcctaaggcacaagagttgaggaatgggtgagcttggtgtcagagcactgtgtggttggagggtggactcttgtgatgctgtggggatgaaattggccctcttttagcataagttggggagtgtgcactggctggaggcttccagaggcttccagccatgaggtgtgagctgaaaccaatttttcctctttccttatagcatgttgagaaaatctgttgggttttcagcagtcagggaaggccggagttctgctttaatctgggtaactgaggctaatatgagcaagactttggttaattaactgggttctcagatgccacagactccgtgagaagtcaccattattttcaatggttgtgatagaatttcccccagtagccattattttaagattatattgcagagttgctttattttgagctttttgtgtatacacaatcccaaactggaagaaattttaaaaaaaggaatcctgctgtgaaaggtatatattactctagatttttcttactgtaaatattgtaagattgtaatactgtcgatattttattaaccaacaaatgttaatctatgtgaaatcagacttattttaaatgtgcttcttatttactgtgtgtggtccctgttgctgacagtattaagttatattctgatgtaagattaactttattaaagaatgtaaacattaatgtttccttatgggaaaacaaataaagtataaagaagacaattcttttcattgaaatatactgtgtatttacacttgctagacccagcaccacttataaatttagtacactgttcagaattttagttaacacagctgacatggttgtgctctgtttgaaagtctaagaataggtattgttggaatatacagtttgtatttgtctgctgtgaatcataatcttgaaatttctaatcaagtttgtaaaatttttatagtgaaacattttaatgacaatttaaaaatttatcttctctaaagaatggtcaaaacaatatcctttcagaaatagaattgttctttaatatctttccaaaatgactttggttaaatggaccagatgtatattagttaaaatttaggactaagttgttgatattctttgagtttacaagttaatccttattggagatgtgccaatatacagttagaatatcattaatttgcactgtttggggaccccatttaagaatgctgaattttgccaactaagaagtaagcaaatgcaatttaaaaagtaaatttgagcattctgtattaaatatgtgcagttattatcacatgaagaaacgcagtgtgtcgggctgtaatattaccatatttgctgtcatgttctcccatctcagtgctgggaaatcaccatgtggaaaccaagcaaacgtgttgtgcatcagccggcttgagtttgttcaatatcaaagctgaaaactagcgaggtctgctgtactgcttattgaagtattgtgattattttaggcattgattcttacaaaatatatactgtaacagtatactttgtacagatttaaattttatttgaaaaaatgaaataaagtaggcaaaaaaataaagatgtttatttttcatgtgactgtataatca

SEQ ID NO: 238 - DNA, 478 bp, Homo sapiens
ttttgcatacaacttcaggggcatcacacatcttctgaaacccaagttaaagatctctgctctaagtaaattgtagagaattttagtgcaaatcgttgataaaattaggaaccaactattggcttaaaacctttcatattggaattattgttagatggtggcccctactagcaaaatgtgacattgcaaccagcttcgttagacattataacaaccagagagaagggaaaaaagcaaagttctgaaagctatttataaggagtcagggcatctctagacatgggagccttcctggttcaaggcaggggtcagggtgcctgacaatttctagcagggtagagtttgataaaccacaatgctcaggatgccaaggggttagccattatcttaaccccttcctcaccaaaagattttagttttgtctgttgggaaacaagatgtcactagggaaaaaaagatttgccttacaactttgctg

SEQ ID NO: 239 - DNA, 394 bp, Homo sapiens
aaatcacactatgaaaaatctctcaatttacttaagtatatacgacagcagttatattctaaaacttgatgcatgtccataggccatctcaagttcacattactgcagttccaggcttctctgggggaatcccaagagagttcattatgagtattgttttgttgttttcttgctaaaaaggccctccttggctgggcatggtggctgagacctgtaataccagcactttgggaggcctaggtgggcggatcactggaggtcaggagttgaccagcttggccaacatggtgaaaccccgtctctactaaaaaatacaaaaattagctggacggtagtgcacacctctagtcccagctacttgggagggtgaggcatgagaattgcttgaacctgg

SEQ ID NO: 240 - DNA, 394 bp, Homo sapiens; identical to SEQ ID NO: 239

SEQ ID NO: 241 - DNA, 478 bp, Homo sapiens; identical to SEQ ID NO: 238

SEQ ID NO: 242 - DNA, 647 bp, Homo sapiens
aaggtcgccagcttcgggccagatgttgactagagccgcaaggatttttgggaactgtagtctagagcaggaaggggtgaggcgctggggcaagtggaaggaggtcgcttaaatgacttcctgccccaagccgactcagtgcagaacgcacccaggaccccggactgtactaggcgttataacgctctctgagaatgctagactgactaaatcgtcatttttgccttcatccgtggataagccacatactgtatgactgcatttataggaaatatttaaaatagtcaaatctacggaaaaggagtaagttagagttttttaggactagcaggattagggggaactgtgagtgattggtaatagctaaagggttcatttttggggtaatgcaaagcttcttgaattagataatgatgtttgcacaactctgaatacactaaaagtgactgaatggtacaccataaacgagctaatgttatagtttgtaaattatatttgtgtgcatgttttttaaaaatcaactttactgaagaataatttagatacaataaaatgcactcattttaagtgaactgttcggtaagcttcaacgcatgtctaaacccttgtcaccaccatcgtaatcaggatatagaatattttttaaa

SEQ ID NO: 243 - DNA, 646 bp, Homo sapiens
aaggtcgccagcttcgggccagatgttgactagagccgcaaggatttttgggaactgtagtctagagcaggaaggggtgaggcgctggggcaagtggaaggaggtcgcttaaatgacttcctgccccaagccgactcagtgcagaacgcacccaggaccccggactgtactaggcgttataacgctctctgagaatgctagactgactaaatcgtcatttttgccttcatccgtggataagccacatactgtatgactgcatttataggaaatatttaaaatagtcaaatctacggaaaaggagtaagttagagttttttaggactagcaggattagggggaactgtgagtgattggtaatagctaaagggttcatttttggggtaatgcaaagcttcttgaattagataatgatgtttgcacaactctgaatacactaaaagtgactgaatggtacaccataaacgagctaatgttatagtttgtaattatatttgtgtgcatgttttttaaaaatcaactttactgaagaataatttagatacaataaaatgcactcattttaagtgaactgttcggtaagcttcaacgcatgtctaaacccttgtcaccaccatcgtaatcaggatatagaatattttttaaa

SEQ ID NO: 244 - DNA, 647 bp, Homo sapiens; identical to SEQ ID NO: 242

SEQ ID NO: 245 - DNA, 333 bp, Homo sapiens
gcactactgagccacacaaagttacagttcccccctccccaggacccctattgagcactacacacaatcacacattcaaaataacacaatgaccactaggacacacatatcaccccggcacgattacacgcactttccaaccgcagacacagtgctacataaagttacatggtcacactctcacattctcacgttactgggttatttctgggtagtagatttactcagtaaggcatccagtacacttaagtgctgctaacagtcatacaaacacaattacacacacccctcagactaacacacagtcacagcctcatcagattctctccacac

SEQ ID NO: 246 - DNA, 333 bp, Homo sapiens; identical to SEQ ID NO: 245

SEQ ID NO: 247 - DNA, 17431 bp, Homo sapiens
tctctgtataagtccctctgaacagggtccaggcagtcccactcctcctgagagaagtctatggacacatcactgaacatcactgatccctgaaacaataaacatacgtattacttgtgtaattaaaaaaatgtatcagagactacgatgcttgtattgtggggtaatacaaaatgagtcattatattggtgtcactgagaacctgtatctttagatttcagaaatagatgcaagagtaggaagtttatattaaacaaattcctgactctgtccattgaaacggcctagaaataatgactaatccagtagcaacgagcatccctagagtctagattgtgatttcttttctttttttttttttttgagacagaaattcgcttttgtcacccagactagagtgcagtggcatgatgtcggctcaccgcaacctccgcctcctgggttcaagcaattctcctgcctcagcctcccgagtagcggggattacaggcacgcaccaccacacctagctaatttttgtattttaagtagagacagggtttcaccatgttggccaggctggtctcgaactcctgacctcaggtgatctgcccgcctcagcctctcaaagtgctgggattacgacatgagccactgtacccagcctagattgtggtttctaaatatcattttcaaataaaagaaaccaaggttctttgggaaaagaactgatttcacgaaatccacaagagcaacttttacaaaatgcacaggatgagtctgaacgtcttgttataccaaaaagcaagaaagcaaccaaaaactgttaggatcatgctgataagactaggaggcaacttgaagatactcccactgaccaatactgttacaacttgcacgtcaaattattataatttttttttgtaataggatttataaatttagagtttgaaaatcttacaaaagttggctgggcgtggtggctcatgcctgtaatcccagcattttgggaggccaaggcgggctgatcgcgaggtcaggagatcgagaccatcctggctaacacggtgaaaccctgtctctactaaaaatacaaaaaaattagccaggcgtggtggcgggcgcctgtagtcctcagctactcaggaggctgaggcaggagagtggcgtgaatccgggaggcggagcttgcactgagccgagatcgcgccactgcactccagcctgggcaacagagcaagactctgtctcaaaaaataaaataaaataaaataaaagttgtcttaagccatcaaataattctatcttgacagtgacattgcaaaactaacaaaatgaagatactagaaatattatgtaaaagtacagggagatgaggcacattttgggggaaatctagagaaaatgtggtatttggatatttagatgtttcatttgtatttctgtttcattagcaactaatgcttgaggcacctatttaataaaatagatgtgggccgtgcgtggtggctgatgcctctaatcccagcactttgggaggccgaggtgggtggatcatctgaggtcaggagttcaagaccagcctgaccaacatggagaaaccccgtctttactaaaaatacaaaattagctgggcgtggtgacacatgcctgtaatcccagctacttgggaggctgaggcaggagaatcgcttgaacctgggaggtggaggttgcagtgagcagagattgcgccattgcactccagcctgggcgataaaagcgaaactccgtctcgaaaaaataaataaataaaattttaaaaaaataaaaagatgtgtattttatttaataaaaagaaagcttcttcccctcctcaatgtagaaattggaacaaagatatgccaaagccctattaggacatttcccataggattaaaaacaaatcccaggcccggtgtggtggctcacactggtaatcccagcactttgggaggctgaggcgggcggatcacgaggtcaggagttcaagaccagtttgaccatcatggtgaaaccctgtctctactaaaaatacaaaaattagccagttgtggtggtgtgcgcctgtagtcccagctactcgggagtctgagacagcagaatcgcttgaacctgggaggcggaggttgcagtgagccaagatggcaccactgcactccagcctgggcaagagagcaagactccatcccaaaaaaaaaataaaaacagccgggcgcagtggctcacgcctgtaatcccagaactttgggaggccaaggcaggcagatcatgaggtcaggagatcaagaccatcctggctaacacagtgaaaccctgtctctactaaaaatacaaaaaaattagctgggcgtggtggcacgcgcctgtaatcccagctgctcgggaggctgaagcaggagaatcacttgaacccaggaggcggagcttgcagtgagctgagatatcaccactgcactccagcctgggcgacagagcaagactccatctcaataaataaataaataaataaataaatacaaaaacaaataaacaaacaaacaaaatcccaaactgtagaatgctgtaagaggggactgtatgcaagtgtgactagataataatcttccaaggaaactttccattgtgtttgatgaatttccctattttctgcagagaaatcaagaggattaaaaaaaaaataagagaatataatacaatagcattataaaagagaataatacgtgttcactaggattggttgcacatcaaattatatggacaactgcaacggactgatcatattaaaaatgtttaatccatgagttcacaacactattttaaaacattattggtcacttttggacaagtctaagaagccaactcattatttggaaaactggtaattaaatggaaagaatcaaacattcttctttcctatatgaactgtccttcagggtaaccaaacaattgatgagggaaagttttactttatagatagacgtattccacttaatctatgaaggaagaatgacagaattaaaagatcacttgtaacccctagtgaatgaatctaaaaattatcaataactggtaatattacaaaaagaaagagaaccagatacgatgtgcatcctaataaaattatgcatcatgaccttatttttttattttttgagtatttatttattgagtatccaagatatattttattggtataaaaccaaaataagatgaggtaattctctggtctaccagttagctatatagacctacgtgaaaaaaacatttttggccgggcatggtggctcacacctgtaatcccagcactttgcgaaggtgggtggatcccgaggtcaggagttcaagaccagtctggccaacatgatgaaacccagtctctactaaaaccgaaaaaattagccaggcgtggtggcaggggcctgtggtcacagctactcgagaggctgaggcagagaattgcttgaacctgggaggcggaggttgcagtgagccgagatcgtgccactgcactctagcctaggcgacagagtgagactccgtctcaaaaaaaaaaaacaaaaaaacctttttgaggaaaaaaggaaaatgttttacttataaaaaaatactaattagttttgtcaataatttatctgaccaaaacaaaaatagttaatgtttatcaaataagtaaaaattcagtaatagtcttataacttctgaaaaaattcataaaattgaaaagcagagaaagatttctcaggccatcagtttttctcctttattaagggagaaaaaggtcttcataattctgctaaaagacatcacctaacaatgcaaggggtagccagagaatgtcttaaatctctatcctattgatgaatcatccccttttgctcgtcctatgcaggaagactatttaaggtcacgttacacagcagctacatgatctggtataacacaactataatcagtttgcttgtgcctgatgcaaaagttctcaactcttggtctgtgttatgtccaaagctgtccttcatctaatatattctaaactacccccatgtgatcttagagcatcaatcaaagctacgaaaaagatatataaagttatatgtaaagttattttatttatttttatttttttgagatgttgctcaggctggagtacagtggtgtgatcttggctcactgcaatttctgcctcccaggttcaaggattctcctgcctcagcctcccaagtagctgggactacaggaatgtgccaccacacctggctaattttctgtatttttagtagagatggggtttcaccatgttggccagcccagtctctaactcctgacctcaggtgatccgcctgcctctgcttcccaaagtgctgagattacaggcatgagccactgcacctggcgttttacaaattctttaataattatttttctggtagaattttctacaatacagatattactggataagacttaaaaggttcttctgagctctgacagtgtgatccacatgacttatgcattggctgaaccattgtaaacatccattatcactatccttaattctgagatacagaaaactcaatgattcacagaaattccttacaatccaaacttcctatccaacctgaaattggacttctctccaggatgttcttacagagttgcagagctctgtatcagccaccaaccccatgatccccaaaggtgcctaaaccagatcttgcaacaatccaacatttggaactaccagcaccacacttcatcctatcttactggagaatgctactctgtagagataatcttggcttgtctatatttccagctaagtaactcacaccttcaactcatcaaataatggtccagacagggtaacttcattttacaaatctattcttgcttccttgagataattcatcccctatcatagtccttgggaaagagttcagaaaaagagatgctcaggtatttacggaatgaaaatattaatgctggttgatttataaaaataaaagggatacttagagatggtataggattatctagctaagaaaaaatggggacaaggattctgaaggggaactctgttagccagaaatgtcaggataaggaaagcaaatgctcatgtcttttttttttttttaaactaaatgtcaggaaggcaagaaaaagcatcaactcacctcagccatggcttctagtattgcagatggttagtcttccttgaggccgttctcctgaaaaaggacagtgttctgaggttgcatgactggggaagtaaaaccctctagaaatcacactagaggtcagataaaaccacctccatatttcttggtcttgagatacaactccagttagtaggaatatggaacaaatcctactccttcctcaatcctacaaacctcaggctttagctgcagcaagacaaggactcagattcattctccctcatgcaaacaacctaagttcctgccttagccaacggattcgggccagaccttgtcccacctcagtgatgttgctctgaacccatgattgagctattatggtctgccctgagctaatgacctactatgacccaagactgagctaccatgacctcctttgcagccctcaggtccccaaaccagactcacacaaatggtgccctttggccaggaacacagtgcactcagatcagaaagaccaaagacttccctaatcaagtctttttgtttctcaaccctcaaaaagtcaacttcactcaccacatgcacacacacaacacccgcatccacccctaaacacacagggatgcaggcactaattcttctagctctgttttattgaaaaaaaaaaaaaaatatatatatatatatacacacacatatatatacatatatacacacatatatacatatatacacacacatatatatacatatatatacacacacatatatatatacatatatatacacacacatatacatacatatatatacacacatatatatacatatatatatatatacacacacacacacacacatatatatatatgcttgtaatcccagctacttgggaggctgaggcacaaaaatcccttgaacctgggaggcagaggttgcagtgagctgagattgtgccatcgcactccaacctgggtgacagggtgagactctgactcaaaaaaaaaaaaaaaaaagctgggtgcagtggctcacagcctgtaatctcagcagtttgggaggctgaggcaagtagaccacctgaggtcgggagttcgagaccagcctgatcaacatggagaaaccgtctctactaaaaaaaaaaaatacaaaattagccatgcatggtgacacatgcccgtaatcttagctactcgggaggctgaggcagaagaatcacttgaacccaggaggtggagactgcaatgagccgagatcacgccattgcactccagcctgggcaacaagagcaaaactctgtctcaaaaaaaaaaaaaaaaaaaaaaaattcaaccttttgccattgccaaaaggtgaggctgtttttaaaaatatctgtgctgaaagaactccttttaagagtctcctaaaaggggatcccattagccaactaatgaaaacttacacaacaataaacagaatacttctgccactcctccacactgtgatagagtctttaacagctatcagtcagttgaaatagctatgaaatgctctaagtccataataatatgtaagaaaaaaattgttataaagtgcacaaaaaaggtgggcgaataaaataatttttttttacatacaataattagagaaggattatatatgtgttcttttcttatcctgttttttatagttctagtattagtggcttgtttccatctacccaagacaaaaagaataaactcgggaactttgaaaaagccagttagtcccagaaaaaggaaaaactgtaccaaagccagaaggacccatcacaacagtggcctcacacaatatcccaagatgaaaaggggattcactgcagttagtagacacacacaaaaccaagtagaaatgggatacaataaaataacaaattagctgaatgttccaaatgagagcttattgcatactctgggcggcaagccacccaggtgttaagggaagagaccaagggcacaagctgttttagtataataaagaaaatatatagaataaaaatagttatactaaaaataaattataattatatataaatattaatcattagtttgtagcattactctttattccaataataatctttgttctacaattataacctaaaaaaacccaagccatacagagatagaaactaaaggaacacagtacagagataaaaactaaagggacacgataaaaagtgaccaaaaaacaaaaatgcgagccctctgttatgcccagactgggccactagagggctccttggtctaccggtaacgccagtacctgggaaggcacctgttacttagccgaccttggtctagcggtagcgccagtaactgggaaggcacccgttacttaacagaccgggaaaaggagtctccctttccctgggggagttaaaaaacactctgctccaccatctcttgtaaaaacgcctgacgttagtcaggcccgcccacagccatccagaggcctgtcttcctgtgatgctgtgcttcagcggtcacgctcctggtccgctttcatgttccgccctgtacacctggctctgccttctaaataacagtaacaaaattagttacaaattttgtttgacagtaacaaaactaaagtctttaaaatacatttaaaaaattatgacgtaaactgtcccctctctctctctgcctcggctaccaaatagggaagggccccctgtctggtggacacgtgactcacgcgaccttaccgatcactggagatgactctcactccataccctgcccctttgccttatacacaataaataacagcgcgaccaggcattcggggccaataccggtctctgtgtcttggtgatagtggtccctcaggcccagctgtcttttcttctatctctgtcttgggtctttatttctacaatctctcgtctccacacacaaagagaaaatcccacaggccctgcagggctggtatcgcctaggaagtaaacattctattagcaatattaaacccctaataattatatagtgatattaacaagggagatttaagttttttaaaaaatgcctggccggatggctgggcgcggtggctcatgcctgtaatcccagcactttgggaggccgaggcaggctgatcacccgaggtcgggagttcaagaccagcccgaccaacacagagaaaccccgtctctactaaaaatacaaaattagccgggcgtggtggtacatgcctgtaatcccagctactagggaggctgaggcaggataatcgtttgaacctgggaggcggaggttgcggtgagccgagattgcgccattgcactccagcctgggcaacaagagcgaagctctgtctcaaaaaaaaaaaaaaaaaaaaagcctggctgggtgcagtggctcatgcctgtaatcccagcactttgggaggccgaggcgggcagatcacgaggtcaacagatcaagaccatcctggccaacatggtgaaattctgtctttactaaaaatacaaaaattagctgggcatggtgacgcacgcctgtagtcgcagctacttgggaggctgaggcaggaggaccaggaggcggaggttgcagtgagctgagatcgtaccactgcattctagcctggcaacagagcaagactacatctcaaaaaaagaataaataaataaattttaaaaatacgactaccccaggtcaatatatcttatagtgaaactgcagatttcaccatgcaaaaatttaaagcacacatcttgtccaataaatgaacttacaaaaattaaaatctatattaaaaatagaaacttacatgtctgttgaagtataaaaagggactcagtctcatgatcaacagcttaggaaacttaaatgcacattgctaagtgaaagaagccaattcaaaaagactacatactgtatgattacaacattctggaaaaggcaaaactatggagacaataaaaagattaggagttgacagggagggaggatcagtcagggcacagaggccttttagagcaatggaattaatgtggatgacatcataatggagataaatgtcattacacatttgtccaaacccctggatgtgtaacaccaggagtgaaccctaatgtaaactatagactctgagtgtccatgtgggttcattagttgtaataaatgtaccactctggtggaggatgttgatgatgggggagaccatacgtgtgggggaaagacgtgtatgggaaatctctgtaccttctgctcaattttactgtgaacctaaaagtaccctaaaaaataaagcatattaaaacaaataaacaactacaaaaaagtaagtcctgtcacatgctacatgtttgaaccctgaggacattatgctaagtcagggattcaagcaatgtatttataaataactggtggttcaaagaataaattgcaatggaagttaaaaatattttacgaggtcaggagatcgagaccatcctgggcaacatggtgaaaccccgtctctactaaaatacaaaaaaaaaaaaaaaagttagttagacatggtggtgcgcgcctgtagtcccagctacttgggaggctgagacaggggaatcgcttgaacccaggaggcggaggttgcagtgacctgagatcgcaccattgcactccagcctggtgacaagagcgagactccttctcaaaaaaaaaaaaaaaatttaaactgaatgataataaaaagtaacatgtcaaactaatttatcaaagcattcaactaattcattattatattgtatcccgttactacttgggtttgtgtgtgtctactgactaactgcagtgaatcccctttctatcttggggtattgtgactggaaagaagccagtcacaaaaagacaaatactattataaatgattccacttacagaggtatctaaggtagtcaaactcatagaaacagaaagtagaacagtggctgccaggggctggggaaagagggaaatgggacattgtagcttaatagttataattcagtttgcaagatgaaaaagttctaaagatctattgtacaatatgaatatacttaacactggaatgtacatttaaaaatgattagcttggtgtggtggttcacacctgtaatcccagcactttgggaggccaaggcaggtggatcacctgaggtcgggagttcgggaccagcctgaccaacatggagaaaccctgtctctactaaaaatacaaaattacctgggcttggtggcacatgcctgtattcccagctactcgggaggctgaggcaggagatcacttgaacctgggaggcagaggttgcagtgagccaagatcgcaccattgcacttcagcctgggcaacaagatcaaaactcatctcaaaaaaaaaattattaagatggccaggcgtagtggctcatgcctgtaatcccaccactttgggaggccaaggcaggtgatcacgaggtcaagagttcaagaccagcctcaccaatatggtgaaaccccgtctctactaaaaacacaaaaattagccaggcatggtggcacccacctgtaatcccagctactcaggaggctgaggcaagagaatcgcttgaacccggaaagcagaggctgcagtgagctgagatcatgccactgcactccagcttgggcaacagagtgagactccgtctaaaaaaaaaaaaacaaagattaagatggtaaattttacattgtcttttataccacaattaaaatgaaaacaaaatcattgaaaaaaaaaaaaaagctagctgggcatggtggcacattgtctgtagtcccagctacccgggaggctgtgatgggacaatcacctgagcctggaaggtcgagtttgcagtgagctgtgactgcaccactgcactccagcctgggtgacagagtgagaggcccgtctctcaaaaaaagaaaaaaacaaaaaaccagaaaaatctacatgttcaatgaagtataaaaagggacccagtataatgatcagtggctcagattccaatgagcttattttgtggaaccaagtcccaggtaccaaacactaattaattaattgagccctcagcctttaagttaagtctgtggttggtttaattttcctcttatcagatattggcaatttttgtgttacttcatattttaagttttgttagagatttattaattttattaattcccaaaaataagcttttgcctttgttagttttcttcactgtacattcattttgtatttcaatatatgttcgttatgtacagcaaaacacgtacaccttaaatatatgcaataccaaataaactaaaaattttatatttgggcttttattcttattatttcctagattttaattttgggggtttaactttctagacttttccttagcttcttgagatgaatacatagatcattaatttttcaacattaatttttttcttttttttttctgagatggagcctcactctgccgcccaggctggagtgcagtggcgcgatcttggctcactgcaacctctgcctcccaggttcaagcaactctctgcctcagcctcctgagtagctgagattacaggtgcccgccaccatacctggctacttttttttgtatttttagtagagatggggtttcaccatcttggccaggctagtcttgaactcctgacctcgtgatccaccagcctgggcctcccaaagtgctgggattacaggtgtgagccactgcgcccggccaacattcatttttttctaacatatgcatttacagctatatattttcctcatattcagctttagaaacataattttggtatgttatttttcattatcactcagtttaaaatattttaaatatctatcacaatttattctttgagtcaccagttatttataaatacattgcttaaatcccaaacattgggatatttctttaatttttgtttttttaaatttagaaatggggtcttgctatattgcccagggtggcctaaaacttctgggttcaagcaatcctcctgcctcggtttcctaaagtgctgggattacaggcatgagtcaccacacctggctgggatatttccaattatcttcttgttattgacttctagcttaacctactgtggtcaggaaagttacagtattatttcattcctttgaaatttattgagactccctttgtggcccagcatatgatcaatttggataaatgtctcatatgcatttgaaaagcaagtatattatgtagttgtaaggtacactgttctatacatatcaatcaggtcaagcttgtcaatcacactgttcaaataccatatagctttattgggtttgtcacttgttctgtcagctattgagaagagtgctaaaaactccccactaagattgtgatttatctactacttcttttagttatgtcaaatatatttgaagccattttatgaaggcatataaattcagaactgttatatcttactggtgaattgatctttttattataaactattcctctttatctctagtaaagcttcttgttgtaaaatctattcttgtcataaagtctacactgcagtttggaatatagattgataccactatttcagaaaactgtcagtatctattagagctgaacatatacagaaaccatgacccagcaatttcactcctagaaatacacccaagacaaatgcattcatatgtgcaccaaaagacatgtaaaagaatgttcccggcagcgtttttcataacagcctcaatatgaaatcaaatgccaatcagtaatggaatggataagtaaaatgtgttatattcggccgggcacggtggctcacacctgtaatcccaccactttgggaggccgaggcgggcggatcacctgaggtcaggagtttgagaccagcctggctaacatggtgaaaccccgtttgtattaaaaatacaaaaaattagctgggtgtggtggcgtgcgcctgtaatctcagctacttgagaggctgaggcaggagaatcgcttgaacccaggaggtggaggttgtggtgagcagagatggtgccattgtactccaccttgggcaacaagagcgaaactgtctcaaaaacaaaaaaaagtgttatattcatacaacagaattttaaacagcaataataatgtgttcactatattcattatatcacctataactaacgtgcagcaacatggatgaattttatatatttatactacatattattacagaatacattcatattacatacgaaatacaatattgagcaaaagaagccaagcatcatctccaagtgaaactgacagtaggaaaaaaaaagtgaaaaaaaaagaagccaagcaaaattcaagtataggtaaaattagtctatggctatagaagacaaactattagttctctttaggagaagtgggtagtgagtgaactggacaagacttgggcttctgtaatgccagttatgttttatttccttatcagatttgagatctggtcaaaggaatatgctttttcttttttttttttttttttgagacagagtctcgctctgtcggccaggctggagtgcggtggcacaatcttggctcattgcaagctccacctcccgggttcacacaattctcccgcctcagcttcccaagtagctgggactataggcggccgccaccatgcccggctaattttttgtattttttttttttttttaagtagagacggggtttcaccgtagccagatggtcttgatctcctgacctcatgatctgcctgccttggcctcccaaagtgctgggattacaggcacgagccaccgcgcccagcccggaatatgctcacttttatacaagtcatcaggtcatataccttgattttgtacttttcagaatgtatggtatatatatatatttgagacagggtcttgccctgttgcccaggatggaaggcagtggtgcaatcgcagctcactgcagcctcaacctccctaggttcaaacaatcctcccaccttatcccctgaatacctgggacaatagcagcatgtaaccatgcctggttaatttttgtactttttgtagagatggggtttcaccatcttgcccaggcttgtctcaaactcctgggctcaagcaatctgcccagtaggcctcccaaagtgctgggattacaggcatgagtcaccatgcctggccccagaatgtatgttatacttttaaaacaacatgatatatcatggtatcagcagattcattaaagattagaataccaaatgaccatgtgttagaatacaagatgactataatgtttataagctgtcggtaggaatttaatttataaaactatattgtagatcagttcagcattatctaggaaatttaaagatgcaaaacatactgtatggcccagcaattccttcatacacttatatcctggaaaggtatgcatatatgctggtatacttgtaaaaacattttcacagcagccctgtcatacaggaaataaccaacgtctgaactgcagctatgtatagcagcgagagtgaggctaacaaatatagtattttataagaaaggcaagactcaaaacaacatcatacagtacaatttaatttatatagtgttaaaaaggcaaaactaaactatattgtttagggataagcagatatgtggtaaaaaacaaaacaaaacaaaactttttttaaaaagtcaagaagaaaataacgattatcaaagtcaggataagtgttgcctaaagagggaggtaggataagtttattctggggaaaggactagcgggcttttctggactgctgaagcaagtttttgttatgctgagggtctctttataattacttcttaaactatacatctatattttaactatttttctgtattacgtaatataaagggattaaacaacaacaaaaaaaaaaacaaatataggccaggagcagtggctcacacctgtaaacccagcactttgggaggcctcacctgaggtcaggagttcaagaacagcctggccaacatagtgaaactccatctctacaaaaatataaaaattagccaggcatgatggcaggtgcctgtaatcacagctactcaggaggctggagcgggagaattgcttgaactcgggaggcgggaggttgcagtgagctgagatctagccattgcactccagcctgggtgcgctgagaacgcgcctctgcactccagcctgggcaacagagcgagactccgtctcaagaaaaaaaaagaaaagaaaagaaaaccaaatataagaaccatacataatttttagtgaaaatacaagatatgaaatggtaaatgtcataagattccaatcttgaaaacaatgtatatgtgcataggaaacttactagaaggaaatagatcaaaatattactgggttatttctgggtagtagatttgctgtttgtaactccctattttctaaattctttggaattgtgtgggtgggtgtgtgtgagacagaggaggggagagtgtgtgtgtgtttaaaaaaacaaaactttagtacactgggaaaactgttctattttctaaattaataagtgaacattttgtagaaagaagtaacagactactgggatctctgagtccactccaaggcttctcatcattttcttgaatagaaacttgtaagaaccaggtcacttgttgactctatgttaaccacgactatccagagaagagaagcaaaaaggaaacccaatgcaccttgtatttggtttggtcaacagccattcttcctctgggtaactctcttgacgagagcagagctgaagaagaaaggaatgatgagatgccaggcctttcttgtggcccagactgagcagatcagaggtcattttggatctacagctactatctatggagagaagaagggatgggggaggtcagagaagtgtaggcggcccggcgtggtggctcacgcctgtaatcccagcactttaggaggccaaggcaggcggatcacctgaggtggggaggtcgagaccagcctgaccaacacggagaaaccccgtctctactgaaaatacaaaattagcagggcgtggtgacacacgcctgtaatcccagctactaggaaggctgaggcaggagaattgcttgaaccggggaggcggaggttgcggtgagccgagattgcgccattgcactccagcctgggcaacaacagcgaaactccgccttaaaacaaaacaaaacaaaaacagagaagtgtaggctgtcatgagcattcttggtatcagaggggtgaggtctctcctctcgagaatctgtcctgacctcacagggagagctggagtcacaaagacagtcacaagcaccccctacccaatgctgcagtcacccagccaccatggggacccacatagacctccacaggcacgcctcacccaaacaataacactatatatggtcacacaatcattgtcccacatctaccttgaggataagttacactagcatatttacagacccctcaaacatagcaccattcagaaccagagtgctacagatagtcacaataccacacgcactactgagccacacaaagttacagttcccccctccccaggacccctattgagcactacacacaatcacacattcaaaataacacaatgaccactaggacacacatatcaccccggcacgattacacgcactttccaaccgcagacacagtgctacataaagttacatggtcacactctcacattctcacgttactgggttatttctgggtagtagatttactcagtaaggcatccagtacacttaagtgctgctaacagtcatacaaacacaattacacacacccctcagactaacacacagtcacagcctcatcagattctctccacacaaacaccctccacaaatgtcacgcaaagttacacagccacacacaatcacagtcccaacacgggacacagtcatacctacacatacagccttacattgttacaattacacaactacaacgaggatatacaatcacacccgcgcacacagagaggcacagtcacataaggtcacactcacacacggaagcccacgcctcgcgcccgcctccccaccaccccctctatcagcccgaccaactcatacatgcccgacacactcatacatgcccaacactccagaccagcctggtcagtcccttcaaactcccatgcacgtacctgcgggccccagccgagcctgcaagacccaggccgctcaccgcgcacttcccctacccttgaggcgg

SEQ ID NO: 248 - DNA, 729 bp, Homo sapiens
ggagagcatgcttccagctggagctgagtccaagcacacagccactcctgcacacgcatgcgtgcaaacagggaagcccaagtaggagaagaggaaagaggttgtagggatttgggaagaaccttgattattccctggaggaaaagacaaatctacttccctgaaatcaccctcgaatctacttccaccctcagaacttaaaatgaactgcatcctttttttcatcttcttttcttctccagtgaatatgatctccaaacccttattttttctttgaactgtaaaatttccactcatggacgatgcaaccaacagatgcaatctctgagaagatgaaaattgggacctcttattataaaattgacctagctggactcaggaaaccagggaagaagtcaatgcaggcatttaaaatgtaaagttttttctggttaaatctatttatttttcttgtaggttgagtatttcttcccagtttttctgctctggtgtataacaaacaggtcaaaatttcccatctttcctcctgatagtagttgaatcctaccttgcatacttaatgcatagtgaaatggcatctagcagaaatacacacccccaaaacacaccaccatttcattaggtgcccaaaaaattctgtatttagcttatttatttattggtatttttgctttttcttaaccactatatattgactgcaaacgaattaataaattatcccttctggaa

SEQ ID NO: 249 - DNA, 510 bp, Homo sapiens
agttattctcccagtagaaattttgtggtttttatctcagtcagttttcctttattttgtatgtattattttatccttatcttctaaagggagcgtcaaacaaaatagacctgtaagtcatatcggcatatgactcatttctccaaagttatcatactaatttgataatacatactttcctacattagtatttggctttctttcctttatgaaaagggagctacctttattgttaacaccttaaacaggactaactggtatctgttctctctgttccctgggattgatgttgattcatcaccataagcaaaacataaaattataatgcagcgatgaagctaattcaaaccaaataaaatagcaagtttatagttaacaaaaagggttggtcaataagcatatttagtaaaatatatttgcttaaaatgaattatactgattattgttctaccatatttctatcaagttcatacctatatctcctgcccagtaaaactgaataattttttt

SEQ ID NO: 250 - DNA, 2563 bp, Homo sapiens
gtgtttttcctttggtccatcagtcattacaggttccattcaagacagtgatagaaactttagaaaactgccagagcatacttgaaagttggtagatccttttgcctaaagatgtaaacaaaactcaagacagaaggaatcagggaatatgtgctattgtgtgcatcttgtttacatttgggatcagtgatggcaaaagaagtaatgagaccactgaaattgttttcattgttttaaataccaggtactcattttcttgatttgaaagtttaacatgacttctaaggacatctcttcaaaaagaaagtaaacagggaatgaaggtggtgggaaaatcacttcacttcacccactatttcatgttgtaataagggccaccataaggatgccctcctcatagtgttcggttctgatcttcctcgagaacagtcacttggcgcactttaataatctggactgctccagatttgactttagatactccatggtatctagtctttatgatcagttgaatgatcagtgtttaagtctaaaaataatgctttcctgaaaatgtttatatttcattgctgtttccttattgcctgctagccaaatggaatttgggcaagcaactctttgaagacttttttaccctagaaatttacttttgtcctaaaaaccctaactgtaaataagcagtcgaagcaagttgccaccttgaagttgagggatacactttgcttcatcagtattaaaaaccatggtactcttattttgtcttttttaattcaaaacattttctaaatgtggtactttgaaccttggagtatttacatgtttctgttcaaaactgtgacttattaatgtaagtctgctagtagtactttttttgtctgagcataagctatatttcaagatatactttgccaattttgttattggtgggtaatcatttttaaattatattgttattaggtaattatttttaaagactactggcatacaatcaaagttgttccataaaagaatataactgagcaatgtatttctctaaatgacttgtaaaaatcaatgaattatgtttaagtctgcattatggtaggttattactcccagctcattttaaagacaagtttgaaagagtcctttaaattttataagcttgtagattccataaactacactgatttatacatttgaaagaatttagccatttaataaatttcttattctcaaattgcatttagattaaaattccttttaagagtgtctgaaatgtctgcctgcgaagaacatgtaaacattgccagataccagtcattattctttagtggctttttagtcctctgcttttttttttaaggcaaaagaaatatgcatctagcatttctaataccaaatccccaattgtgattgttttaaagatcatggtatgatcacagggaccaaggctgtgtgcatatataactctggatttgaaaggaggagagttcagccatctagttcttttcttcacatgacacttttaaacagccagtttgactggaattaaccaacttggcacagcctaaaaaaggagtaatgtgaaattaaattatttttctttgaaagtcttttgaaataagagaccatgtaagtaggaccctaagacaaccaaggaatttgcttccagggccctcattcctctgctgttacttacaaatgttttaatttttactacctgatattctttctctaccttttccacatttgaaaatatacaaggcagctcacttcatcctaaaaacctaaaaactccaggaaggaaagaaaaggatgatatggggaaatttgccataaatgccggttctggttcttagtttagccatttccatcagttgaaattgtggtgtgatctgttgcttgtttcgttgttgttttgtttttgtgtagctttgttttttaatattcatttaataagatgatgggcaatagcaaacatttttactcccaggaatataatttatcaaattgaactattttatttgccaaagaaacttgtttttaatatcacgggtaatgggtaagtgtgaaaactaggcttttttttatgaaacaaaaaaaggtgacgaataatatggcttttgtttctgtttctgaagcctgatttcatttatgccaggttttgaaaaacagatctttttcttaagtgaaagcacctttaatttgctctaacggtacatcctgtaaagacagaattctgcatagccttttaggtgtttttacagtatgtgaaaaatacaagactcattctagagttaaattaccaatcttggttgatattatctgcttccatttttattaatttggaaattaatatgttgctagtaaatattggtttttacagtacccagtttgaaaatgtaagttatcaaaacttaatgtagtgaatttgtgtaaccatgttgtattgttgagaatgtatttttatttaaattttattttcttatcaagagtattataaaaattaacttttgtaactgtcgcttggaaataactcaaataaattacaagaagcctgtctgttctttgtgagactgta

SEQ ID NO: 251 - DNA, 2563 bp, Homo sapiens; identical to SEQ ID NO: 250

SEQ ID NO: 252 - DNA, 4187 bp, Homo sapiens
tttttatcatccctctgtgtatctgaacggaaattggctctgctgtcaggagactggtgaaaacactctcggctgcaagccatgtactgcgtaagtttctttctgattataaaagcagtgtgtcaaaatttgatatatccatgcaatgttaatattatttgtccatgaaaaggaatgacatactgatccatgcaacaacaaggatgggaccttgaaaaattatgctaagtgaaagaagtcaatcataaaggccacgtattatctgataacattgatataaagtgtctagaataggtaaattcatagaaacacaaagtagattagtggttacaagggataagaagggaggaatggggagtgctattggatgcagagattcttttaggagtgaagaaaatgttccaaaattaatagtggttgcacaagttaaaaaattttaaggcaatgtttaaatagaagcatgagcttgaaccaagatatcaagaaagaaggatccttagcattctctttctaattgtatggaacaaccattgtatttctatagacttaagtaataatatattgttttgtgatgaagcataggttgtggaaatgattttactttaaaatttccctccttctgattagagtcacataacaaccaaaactctccttggccccactttattttaactgtcaaatgaaactaaatttccagacttccttctgcaaaagtctgtggttctatttttagtctcaaaccatcagaagtccttggcatgttaacaaaataaaatttgtataatatctttatttttttatttttaccatagaggtgtccctgcagacatccaaatagatattgatgaagacagagaaacagaaagaatttattccctttttaccctcagtttacttaagctgcagaagatggaaggtaaatacacaatctatttttatataaccataatctttcattaccaattcctaaagtattgctttagcattatacaaaagttgaaaatactcatagatttaccaaaatgttatttattgaaagttgacaaacccacagagaggcatttttcattgacattcatgaagtaaaaatactgtttttgcatgaatgtgatgatcctaataaataaaatgtatatattttagttatctcggctctgccaagggaaatcccctcagcataagacacttgaaaaattcttatttgtactacatattgcatttatagaatttagttgtctgatcagagatttattttcctgctctttgtagaggcttgtggaactattgcagtctatcaaggaccacagaaagagcctgatgattattctaactttgtaatcgaggattctgtaacaacctttaagacaattcagcaaataaaaagcataattgagaagctggatgaacctcatgaaaaatataggaagaaaagatccagtagtgcaaaatatgggagcaagtgagtaatttttaagctattgtaaacatatttttaaacggagtttgagattgcctctcctgccccaacctcacacctcctgctcacccacatctgtcaacatcccgctcagggccattctctggtgcaagtttccctggccactccaagtgctctttgtgttgttcagtttagccatcatttcactgtgttggtgctatactttatcgactttttaatttcatatatatgtatatgaaattatatatgatatatgtatataaatatatattttatatatatttatatttatatattatatatttatatttatatattatatatttatatttatatattatatatttatatttatatattatatatttatatttatatattatatatttatatttatatattatatatataaatatatatatatatatatttagtttttgtagagacaggttcttgccctgtcacacaggctggagtgcagtggtgtgatcataattcactgtaacctccaactcctgggctcaagcgatcctcccatctcagcatcttgagtagctaggactacaagtgtacaccactgtgcccagctatttgttttattttttgtaaaaacagggtctcgctatgttgcccaggctggttttgaattcctgacctccagcgatcctcctgcctcgtctctcaaagtgctgaggttacagatatgagccaacaccaccaggctgtaaccagttttaatgttacattcagttgtaattcatttcttgaatacttagtagctcttcgttttgtttttgtttttactgatcctccttctacagtacataataagaattcacaaaactcacccccaaaaaaattaagctgtaaaagtgctagaattattttatagttgattttttggaccacttcaggtgtagatggatactgcaatggataacaacagcaacaactcgcatttattgggaacttactccagcaaggggcactgtgcttatagtactttacagcttatgtagattgcttttagaagcaagttaatgaagtcccaattgaggtggcttaaacaataaaactatttactcttgcaaattaagtagttaacttctacagttggttaattcagcagctcagcactgtcatcaaggaacacctgccactcagccaacctcaacaaggtgatttctctcctcctcaagcttgttcccccatggtcacagatgagctgcaataattcagagccccacatttttatatgatagcatccagaggcagaaaaggctgttttctccgtactaggagaaaggaaccttctctagagttacccccagctttccctgaaacacatggctacccagtggtagagcagaatcagggtctgttacaaagaagtggatagggcggggatgggtcttgggccagcaaggaacagtgtttgccacagtgaacactcattgatcctcaaatcagcccaacttggttttatcctcattttacagctagagaaacggaggcttagggaagctaagtgccttgcccaaggtcacacagctgacaagtcacactgctgactagggctctgaatcctggccctaccactttaaatgttctttgaaaaatatgtgaattaataattatattttttattcatgtacaataaaaatcaatttgacaagtataaatatttatatgttcttcctagatagatgcctcaattagaaaggttattagaagcatcctaatcctgtcttttctgtattaatgtaattggttctcttccaacagtagtaatccagtttccttggagccctgggaagtttccatatgagatcccagacattctttcttaaatagtacctctccactcatacccatacacaccataccacttcccagctttatttttctctattaaaaaatatcaacctctaccatactaaatatcttattaattttatttaccctataccagagtgtaagttccatgatggcaagggttttcttggtctgttttgtttactactttatctttaagttctacactagggtctaagattgaataggtggtcagtaagtactcattgaattaatgaaacaacatttggcatgagagattatccagggaaaattctaaatacttaatggattatatatttgtcaccctttaaatttttgtatttcttaaattttgaaaaatgactttttttcttctctagggaaaatccaattgttgggaaagcatcttagagtttaacagattggttcagaagaactggaaaatattatttttcttggagcttttcaattcatcatgtattttgttcatggtatttaagaatgagcatccgcttcaatgtcatctgcctccacattgtatttaatatttaataattgaaattaattgtttgggaatcctggtattgatgtattactagagaatttaaagcccaagattcccttcatacctgtgtgaccaaatccatgtttctgcaacttctttttaatcgaaagaatcttcctagaaaagctttgtaacaaagggagaactcctccgtagcaagaaaccatctcttcttgtaacactctgttctgtggacttgttttcactaccatcagtgcctgctctatactgccaacattgtgttttactagaaaattccaattcatgacagttcagagcttttcatttagttcatgtagaccctcccactttaaaaaagaaaaaaaa

SEQ ID NO: 253 - DNA, 1453 bp, Homo sapiens
ctcccaaagtgctgggattacaggagtgagccactgcccccagcctctttctcatttaaaaagaaatggattaaaagttcatttagaacatgagtaaatgttttatatctttttctagtaaaaccttatagtttttgttgctataaaaatgagccccctttttttcctgtttgataatctaattagttattactagagagtaagttgatttttatgttaatcttgttttcagcagctttgatgatttgttagttgtaatagttctaatctggcagttcttataatctacctgttgattcttttagatttattatatagaaaatcattatgttctcccatagttttgtctgcttcttttaaacctaatgttctatataatacttgatttattgcattgaataggttttctattcagtgttaaatagcaggcaccttttcttgttcctgattttagtgggaatacacctataatattacaaataagtataatatttactatagttttttagcgtagatcttttagttttacagtttatctgccccatgtcagtattaccctgaatttaaggtttccccattaatagttttactcaaatcagaatcatgtatgaaattaaaaacatatatacatctggctagagttccagatattctgatatctggagtctaggcatttgtatttttaaaaagcattgtgcttactatttaacattggatagagatcctattgaatgcagtaaaccaagtgtgatatagaacattaaattaaaaagcaagacataactatgggaaaataattttttgtttttgttttattatggagattgaattttattggtgtttctgtatctgataaaatcataagtttttaaaaaaataataatttgctgtcagtaattgattttctattgttgaacctattctgggctaaatgagcaggcatgatacaacagcctaggcatgatacaaggatgactaggaagaactagaatgatgatgatgacagtaatagtggaaaattgagagttataatggtagatagaagggagaacgtgtttaaaaagggcattaactttgatattaaatgctttaaatcagaagttttgtgattgcattaccctatcagtgaaagaattgagtatgtacccccagtgtttgtgtttatttaaaactgcatagtactggctgggggcggtggctcatgtctgtaatccctgtactttgggaggccatggtgggtgggtcacttgaggtcaggaccagctgggccaacatggtgaaaccctgtctctactaaaaatacaaaaattagccaggcatggtggcatggccgatagacccagctactcgggaggctgaggcacgagaatcacttgaacccaggaggaggagtttgcaattagccgcgatcgcgccgctgcactccagcctgggagacaagagtgagactgtc

SEQ ID NO: 254 - DNA, 1455 bp, Homo sapiens
ctcccaaagtgctgggattacaggagtgagccactgcccccagcctctttctcatttaaaaagaaatggattaaaagttcatttagaacatgagtaaatgttttatatctttttctagtaaaaccttatagtttttgttgctataaaaatgagccccctttttttcctgtttgataatctaattagttattactagagagtaagttgatttttatgttaatcttgttttcagcagctttgatgatttgttagttgtaatagttctaatctggcagttcttataatctacctgttgattcttttagatttattatatagaaaatcattatgttctcccatagttttgtctgcttcttttaaacctaatgttctatataatacttgatttattgcattgaataggttttctattcagtgttaaatagcaggcaccttttcttgttcctgattttagtgggaatacacctataatattacaaataagtataatatttactatagttttttagcgtagatcttttagttttacagtttatctgccccatgtcagtattaccctgaatttaaggtttccccattaatagttttactcaaatcagaatcatgtatgaaattaaaaacatatatacatctggctagagttccagatattctgatatctggagtctaggcatttgtatttttaaaaagcattgtgcttactatttaacattggatagagatcctattgaatgcagtaaaccaagtgtgatatagaacattaaattaaaaagcaagacataactatgggaaaataattttttgtttttgttttattatggagattgaattttattggtgtttctgtatctgataaaatcataagtttttaaaaaaataataatttgctgtcagtaattgattttctattgttgaacctattctgggctaaatgagcaggcatgatacaacagcctaggcatgatacaaggatgactaggaagaactagaatgatgatgatgacagtaatagtggaaaattgagagttataatggtagatagaagggagaacgtgtttaaaaagggcattaactttgatattaaatgctttaaatcagaagttttgtgattgcattaccctatcagtgaaagaattgagtatgtacccccagtgtttgtgtttatttaaaactgcatagtactggctgggggcggtggctcatgtctgtaatccctgtactttgggaggccatggtgggtgggtcacttgaggtcaggaccagcctggccaacatggtgaaaccctgtctctactaaaaatacaaaaattagccaggcatagtggtgcatggccgatagacccagctactcgggaggctgaggcacgagaatcacttgaacccaggaggaggagtttgcaattagccgcgatcgcgccgctgcactccagcctgggagacaagagtgagactgtc

SEQ ID NO: 255 - DNA, 415 bp, Homo sapiens
tgagccatctaaaataatctgtgtcactttcattcatatcattcagagtagtactgtttactgtaaattagtaaatattggaggatgttttagcaaaattattgcattggtgtggggtagtttctcataataattagatagcagtgctaattttactaaggccattcctattttataacaacattctgctgctaacataagattatatatttttgttttctttagccacaggaagtggggaggaggagggaagatgaatgtaatcattaagatacagaagacatttcaattttatcctccttggaaatcatttggtctgttttcaggctgttcttactaatcttgactctgtaaacgttagtaactggatgtcagtaggctcatacagtttatttcaaatacagctcttcacaaa

SEQ ID NO: 256 - DNA, 415 bp, Homo sapiens; identical to SEQ ID NO: 255

SEQ ID NO: 257 - DNA, 454 bp, Homo sapiens
ggtaacaactaatgttggaactatgaaaaactcttctctacttttaacaaagcttagtcacaaacagttccccagttgatgagaaaaactaaaacaacagaacaattgaaagtctgaatctgcaagttcatctctgagaaccgaattttacagccactccagatttgtactccaaatggatagtttgactgtagaaatcacatcccttcagtctgccaatgtgataactgcccaagagagagtgatgcctacattcatagataatcccctttcccccatcctatatataagtggagtcaacagcagctggaggaaaatggcaagaacttggaatcaagattagcttagaataacactgctgtagacagtttatcagctcttcagcatatgtccgttttccttgaaggatgagcctttagaaacctctgacaataaagtttattttacacccatt

SEQ ID NO: 258 - DNA, 453 bp, Homo sapiens
ggtaacaactaatgttggaactatgaaaagctcttctctacttttaacaaagcttagtcacaaacagttccccagttgatgagaaaaactaaaacaacagaacaattgaaagtccaaatctgcaagctcatctctgagaaccgaattctacagccactccagatttgtactccaaatggatagtttgattgtagaaatcacatcccttcagtctgccaatgtgataagggcccaagagacagtgatgcctagattcatagataatcccctttcccccatcctatatataactggagtcaacagcagctggaggaaaatggcaagaacttggaatcaagattagcttagaataacactgctgtagacagtttatcagctcttcagcatacgtccgttttccttgaaggatgagcctgtagaaacctctgacaataaagtttattttacacccat

SEQ ID NO: 259 - DNA, 3036 bp, Homo sapiens
cttagctgcactcagtttacacctggcctgtatcaccacttagctctcactctagcctcagttaggtatcagcaagacctcaccaaagattattgtttcgttgtatgtgtgtgtgtgtttttgtttgtttcaagtagcaactaatgttggaactatggaaagttcttctctacttttaacaaagcttagtcacaaacagttccccagttgatgagaaaaactaaaacaacagaacaattgaaagtccaaatctgaaagctccatctctgagaagcaaattttatagccactccagatttgtattccaaatggatagtttgattatagaaatcacatcccttcagtctgcaaatgtgataactgaccaagagacagtgatgcctagatccataaataatcccctttcccccaacctatatataactggagtcaacagcagctagaggaaaatggcaaggacttggaatcaagattaagttagaataacactgctgtagactgttcatcagctcttcagcatatgtccattttccttgagggataagcctttagaaacctctgacaataaagtttattttacacacattctcttgcctatgatttttttgtacaaatcacaattacaaaactttcttgctccagctaaaagcaggaaactcagtcacaaatgtgttcactacatgtataccacagaatgatagcagccagtctgaatgcatcacttgattccaaaattaaatgttagcactcagtagtgaaactacatgtatctccaactctggaagccccaggcaagatactcctgtttcctgcagggaaacagatctataagcagggcagcagtctcacacatgtacattcctgggaaacccaaggaaacaatgatagtgatgcagggcaggcgagcctcaaaactggtttgtagcccgggaaatttcttccagactgtagtttccttggctttgccaaggaaagaattcaagggcaagccgctggtgaaagaaagcaacttttattgaactggtgctgctacttgcagagcagggctaacccataggcaatgtgcccagagttggtgcctgtgggctgctagctagttgtttttagacccacttttaattacatgccaattaagaggtaggttattcagaactttctggaaaaggggcagggagtttccagaaccgtataaagtaacttccaggccattgccaaggtgtgttgccatgacatttgtaaactggccatggtcccggtggtagtgtctttatgctcataagtagtaagagcaactagaggtcactttcatcatcatctgctggtttcagcaggcttcttcactgcaccttgttttgaccagatcctgctctgttcaatggggttgtgactggaaaataagtccttctggtctcctacctcatttccccatcagagattatatactcctccttaatcttaaggggcttgtagaagggtggaggttcatcttctgtaactgcttcctgctgatgttatgggcatagaacctgcctagcactggagaagtaaaatctctggatacctgttctaaaagacccaaaggcaggatgtctttattttctgggtcagaagaggggatgggttgaaagccttgtgccagcatcgtctttacatggaattattgtaatctagaagacacaaactttacaaggaggttaaacaagcaaggaccaaagattagtaataacaagatatctgttaaaggtcctaggaagggtaaaaatcaagtgtctgctggtagagattcctttattgaattccatcagcagggcaaagcggtaagagagaaaacattataattaggagtaagagaaaaactttcatgctcatccacagcatcatgttattaatatttatctgtgcatttgcaaaacaatagctttaagtcttctgggagtttgcaagtataggtcatggcatcttcctctgacatctgtgaggactcataagaatctttgaggctgggcacagtggctcatgcctgtaatcccagcactttgggaggctgaggcaggcatttcacaaggtcaggagttcaagaccagcttggccaacatggtgaaacctcatctttactaaaaatacacacacacacacaaaaaattagccaagcctggtggcacgtgcctgtaatcccagctactcaggaggctgagacaggaggattgcttgaacccagaaggtggaggttgcagtgagccgagatcgagccattgtactccagcctgggcgacagagcaagacttcatcaaaaaaaaaaaaaaaattaactttggagtttaacagcagtgggagtgcttaataatgcctgataggggccctttctattttggttgtaattgattcttgggggatccttctttctaagtttttagtaagactaagtctcctggttgaatgggggagttaatccttttccttgtgggaagttacgtttcatttccatatgattgaagggccttttgaacctggcctaagttgataatctatgtgtctcttcatcaaacagaaggtctaaagttaaaaagggccttccgagctgctcaggcgacccagtgctcggttggcccgggccgcgcttaactgtcccaggtcagttaagcccgtgggagcccaggtcatggggcagccagggcctctgcagtgtgaggcgccgggctgcgggcgggcaggcgggaggcttagggtgggtcgcggtcgcggcccccgccgcaggccctggcggcggcatcgtgaacatagacgtggagttccacatccggcacaactacccctggaacaagttgccggccaacgtgaggcagtcattaagtggagatagctcatcatggaggtcttcatctttgtcttcacatcaagtaggctgaggaggaggaaatacaggaagtattggtcttgctgttcagagtggcagaggagaaagaaaatcccagccgtcttggaaattcacagagagaatatgaaaatcaggttgtcctgtacagtatctgcaatcag

SEQ ID NO: 260 - DNA, 8556 bp, Homo sapiens
gtgatggtccctttggttttggtgcctcttccatgagcttcagatcagaactagctatgtggttccaggctgccttggtttaatcccttgtcttgcctacttcacctggctcaagagggaagtccaggaggaagaaatggatgaagtcctggagtactcactagatgaacagtatttgactcattccagctgccatgactcccaccagcttcccagcagcaatgccttcctctttgatgcacaggaaggcccctcggctgtggaaacagccagtaagtgctcctttgataagaaaaataaagctccatcaatctctcagtagctcctacattctacatgctcaccactctgtctaaactgagagatgttattctctgcaggcaggccctaaacattcactttaaaaaagtgattaggctgaacacagctctgggatcaactctcaagtacaggtccctggtgggtcaggtaatttgctctgttcctgtcctcacctcagtccctctggtccagaccggcatctgcaagccggtatactcaaagcaggccagaatggagagagtgaagagattatggcagactctctgccactactgccgcgcatgtacaaatctgtttaacagatcttcttctttaaaatgggacatctcatctttcctgaaatatatatattttttgagacagggtctcttgttctgtcacccaggctagagtgcagtggcatgatcttggctcaccacaacctaaaacccaggttcaaatgaccctcccacctcagcctcctgagtagctgagaacacagatgcatgccactactcctggctattttttttgcctttttggtagagatgggttcttgcttttttgcccaggctggcctcaaactcctgagctcaagcaattcacccacccctgcctcccaaagtgctgggattacagatgtgagccaccgcacccagccttcctgaaatactcttgataattatagttcctgaacagctttcccaagctgttctagccatcccaagaatgttggcaggcttgtccatatgtttggaggtgcaattataatggttcctgggtttcaagctccagtctccatctcccctcagatgcttgctttcccataaggttccatctgactactggaatatcaggggatttccataaagacaagactttgatcttggcaaccctttggtaaatagccagggttctcaatctttgtgcagcaccaaggtatttttaagatgtctgttagtttcgtctcagtgttgtaattccatctaaataaacaatgaggctatctgctggagaaaaggctgaatctaagagcaatgccgccagcatgccctcttcccagaataactccacgctagccattggagcttcattaggtatataagagccctttggtttggtagcctctctggtgtgtgtatagattaaaaccttgacctatatctcctctcccttacttgaatgtttgactttactttgggggcaaaagtttggattgttaggagactatatgctttatatactcttctatgcaataaaaagagattatattaattcactcattgagctttcacagtaatataaaccatattaggcttgtcattctgtcagtgatgggtgtaagtttgtggctttaattagtcataccatcttctgacaaaggcatccttatttctctttccaatttcacagtaatggtgcagaagaaggtctttaccatctgttaaagatgttcagggccgggcatggtggcccacacctataatcccagccctttgggaggcctaggtgggtggatcacttgaggtcaggagttcaagaccagcccggccaacatgctgaaaccctgtctctactaaaaatgcaaaaattagccaagcatagtggtgcacgcctgtagtctcagtcacttgggaggctgaggcatgagaatcctttgaacctgggagatggaggttgcactgagccaagatggtgcctctgcactccagcttgggtgacagaatgagactctgtcaaaaaacaacaacaaaaacaaaatatgttcaggagagatattttgtagagaggaagatattccctagtacctataagtcatctcaaggaagtggtcataccttttctagtgctagaaaagccctactcagagaccttcagtgttttcccacctcctgtcaacctgccttatacttcccatatctccatgtgggaggcatccctgtggagtttgcttagcacttggccatgctttctttgaaaccttaaaagctcttaaagaaagttgccttatgttccctgatgagaagatgaagttggcaaaagaatggtgaaaggcagggatcttgacgagaggcccctgactatccctttagtgatcagcatcttcacttcccatctcattccatgtcctggtggaatggctgcagaagatgagatccagagccagtggcagcacctgaaggagacccttttcatcaacaactgcctgtgagaaaagctagaacgtcatcacagcagctttgatgaagaaaatggtaggagaggcccaagtcagcctgcttctggcaatatgtatttttctaaaggcgtgtgactggggcagagttttatagatttcaaacactttgacatactttacttcacttattcattacaaatgtcccagctagagaggcagggcagctactatcattcctatttataggtaaataaataggcttaaagatatgccttcatcttagaggtatctacttctaaaatcattcttgtgattcctaagctgtctgctgtcttctgtctgctgctgtacactgcctgctgtctctctgcttcttatgtgattggcattcagtagaacccaggtttctgagcacctcacataacagaatgagtctcctctgctgccatcctcatcatcttcccttatgtcttggtgactcttcattctaccaccccaaggtggttctctccaacccccctcctcttagattgttctcacacagaggccatcatttcataacattgtgctgggccagaagaaccataagcaggtcccttcccataccaaagccgtaactattttggaaaagcctccttcatattgcagccattggacatgataatacatgtgatgtgctggcatttgttgagaatcatgtgaaaattaagcttccaccccatcacactaacgttccagccctccacggttttctccctaggctaagatagagaggaagaacatgaaatgtgcagaaagcattctcttaagcaaatgtgtataacttgcataaattgtaataatttcctggaacaggatgcacctctaacctctacaggcaaatcatagattccattgtccagctgtataatgaaaacagagttctcagagaagaataccggagactcccccgacttgcctgaatcaaatttccagaggtaagtggtgaaaggccacaatatgaagtcactctcagatgggtcccttctcttgccacactccactgtagaaataaaagaggacggggaggccagagctgctcaaaaccttataacccacaattctcatagctattctcaacttagagagggctgctttctagacacaccccctccaggcccccagactgccaggctccaggaataagtagctctaagaaatacagtatttcggtgcgagccacaccccactattgcaaattggagaagagaaggacaaacttaaaaggtgaaaagatttaacagaacaacagggtgaaaccccatctctaataaaaatacaaaacttagctgggcgtggtggcatgcacctgtagtcccagctactcaggaggctgaggcaggagaatcatttcaacccaggaggcagacgttgcagcgagccaagtttgcgccactgcattctagcctgagtgacagagcatgattccatctcaaaaaaaaaaagaaaaaaaaaaaagaaaagaaagacagaaaagatttaagagaacaattattttaattgaatacattttgtcaagattaaatcaactttcccctagaatactgaaagaataagcaatcataatttagattctaagttactggcctttgagaaagtgtgaaatccaaaaagatgccgtgagccaaaaaagagcaaaagtcctaattttcaaactgatgaaaataaagtactaaataattgaaatcgtcgtagttcatcttggtccttggcaaaataaaaatttattgattgaaattataatatactagctaccttatcgtgcctagctcttaccactgaggagaaaaaccaaacgcaaacaaaagtatgttcaaattggcaaaaatgtttacaaacctgcaaaatctcttcagcctatcccttaaactgcagacttggtatttactaagctctgctgtgtacaatacccaccttaatatccattcttgcacaagttctgttaggtataagccaaaatcacatgggatttttttttttaccctctcatgcctatgtttgcttttgcttccaaagacccttctgagtaaggactgtcctcagactactggagtcacttagtcacaagcttgcctgaggctcagagctggcaatacctggtagtttatgtcaatcccacatgcaaccctgcctgcaaagtatttacccatgattgacaggtgcaggtgtatgaaagcccagctccttgacttgaggggtgcgtttgtggtgaattagctttgggaaaagggaatccagaggccaactttgtaaaaatccagataggtaaatggagagaaatctttgccttggaagtccagttgagaaagatagtgatttacttcggactgtgaaaagagagactaaaatctttactttctcatgggaaagaagcctatggtgaaagagaaacaaagaaaatggtgggaaatagggtaggtctactcagtagctttaaaccattctgtcatattataaagcctagtaaggttttaactaacacaagtgcctggactctacacatagagattctgatttaaatgcttccaggtgggtggaagacactagtagtcttaaaaagctcccaagtaattttaacatgtagctaaagatgaaaaggacaatctatctactagaatgtcaagtcgccagcataggagtgtcccaaatgtgcagctacctcatagaaaaggcttaaccccacccattgatggaatttgccttcctctctccatggtcttgtttgcatagcatggaaaaaaagagaagagaaaaagaggtagatggatagattgaacctataatttgcctatgtggagcagtttctcaaacttttctgaccacaagatgcagtgagaaatacacaattctttgtgatcagtttttaaaaaatcttttattatgtgtaatccacccttcctagtatttaaataaagcctgtagtagtaagcagtccactatattgatttcacaacccataagttgttcagaattgcaattagaaaatttttaattttggccaggcgtggtggctcgcacctgtaatcccagcaccttgggaggatcacctgaggtcgggagtttgagaccagccggaccaacatggaggaaccctgtctctactaaaaataaaaaaaaaaatttttttttttaaattagctgtgcgtggtggtacctgcctgtaatcacagctacttgggaggatgaggcaggagaattgcttgaaccctgggggtggaggttgtggtgagccaagattgtaccattgcactccagcctgggcaacaagagcaaaactgtctcaaaaaaaaaaaacaaagaaagaaagaaaaagacaaagaaagaaagtaagaaagaaagaaaattttttttcacttttgctcagcctttttatcaaggaaaatcccaaaagaacatttactgtaaaagaacattgactataaacatctttctgtgaatccttatttctgtcccagccaccatgacccaataatctctaaaacctgttagtgttctccagattgaagccttccctctaactgctcctaaatctgtgatgtagtggaaaaggtttgaggccttgattctcatcccgggtttttcacctacagatcatatggccttagcctcttgacaccattgtctccttatggccaaagatggaactgtacttgggtggtatctgagcaccctgttggctttgacattctagggctcttcccttggcaccactctcttatttaaaaggaataggatgtggacttagaagggttatttctctgcaaactatcctctctttcttatgacaagctatttctgaatgtgcacatttgaggctaagcaaatcccttcctgggaggtgtgaaagacctttatttctctccagaggagtattatggatgtggtagagacctggctaactcatctgcagcggctttgagcaaggcttttagaaccataaggtggctggggtcctgtgtcctacaccacaggccagctagttcatttcaggagactttcttttcaatctattattactatcttcttctagactgtagttcactaccagagattatccacttagctgcactcagtttgcacctggcctgtatcaccacttagctctcactctagcctcagttaggtatcagcaagacctcaccaaagattattgtttcgttgtatgtgcgtgtgtgtttttgtttgtttcaagtagcaactaatgttggaactatggaaagttcttctctacttttaacaaagcttagtcacaaacagttccccagttgatgagaaaaactaaaacaacagaacaattgaaagtccaaatctgaaagctccatctctgaaaagcaaattttatagccactccagatttgtattccaaatggacagtttgattgtagaaatcacatcccttcagtctgcaaatgtgataactgcccaagagacagtgatgcctagatccataaataatcccctttcccccaacctatatataactggagtcaacagcagctagaggaaaatggcaaggacttggaatcaagattaagttagaataacactgctgtagactgtttatcagctcttcagcatatgtccactttccttgaaggataagcctttagaaacctctgacaataaagtttattttacacacattctcttgcctatgatttttttgtacaaatcacaattacaaaactttcttgctccagctaaaagcaggaaactcagtcacaaatgtgttcactacatgtataccacagaatgatagcagccagtctgaatgcatcacttgattccaaaattaaatgttagcactcagtagtgaaactacatgtatctccaactctggaagccccaggcaagatactcctgtttcctgcagggaaacagatctataagcagggcagcagtctcacacatgtacattcctgggaaacccaaggaaacaatgatagtgacgcagggcaggcgagcctcaaaactggtttgtagcctgagaaatgtctcccagactgtagtttccttggctttgccaagcaaagaattcaagggcaagccgctggtgaaagcaagcaacttttattgaactggtgctgctacttgcagagcagggctaacccataggcaatgtgcccagagttggtgcctgtgggctgctagctagttgtatttagacccacttttaattacatgccaattaagaggtaggttattcagaacttcctggaaaaggggcagggagtttccagaaccatataaagtaacttccaggccattgccaaggtgtgttgccatgacatttgtaaactggccatggtcccagtggtagtgtctttatgctcataagcagtgagagcaactagaggtcactttcatcatcatctgctggtttcagcaggcttcttcactgcaccctgttttgaccagatcctgctctgttcaatggtccttctggtctcctacctcatttccccatcagagattatatactcctccttaatcttaaggggcttgcagaagggtggaggttcatcttctgtaactgcttcctgctgatgttatgggcatagaccctgtctagcactggagaagtaaaatctctggatacctgttctaaaagacccaaaggcaggatgtctttattttctgggtcagaagaggggatggattgaaagccttgtgccagcatcgtctttacatggaattattgtaatctagaagacacaaactttacaaggaggttaaacaagaaaggaccaaagattagtaataacaagatatctgttaaaggtccgaggaagggtaaaaatcaagtgtctgctggtagagattcctttactgaattccatcagcagggcaaagcggtaagagagaaaacattataattaggagtaagagaaaaactttcatgctcatccacagcatcatgttattaatatttatctgtgcatttgcaaaacaatagctttaagtcttctgggagtttgcaagtataggtcatggcatcttcctctgacatctgtgaggactcataagaatctttgagg

SEQ ID NO: 261 - DNA, 8557 bp, Homo sapiens
gtgatggtccctttggttttggtgcctcttccatgagcttcagatcagaactagctatgtggttccaggctgccttggtttaatcccttgtcttgcctacttcacctggctcaagagggaagtccaggaggaagaaatggatgaagtcctggagtactcactagatgaacagtatttgactcattccagctgccatgactcccaccagcttcccagcagcaatgccttcctctttgatgcacaggaaggcccctcggctgtggaaacagccagtaagtgctcctttgataagaaaaataaagctccatcaatctctcagtagctcctacattctacatgctcaccacctctgtctaaactgagagatgttattctctgcaggcaggccctaaacattcactttaaaaaagtgattaggctgaacacagctctgggatcaactctcaagtacaggtccctggtgggtcaggtaatttgctctgttcctgtcctcacctcagtccctctggtccagaccggcatctgcaagccggtatactcaaagcaggccagaatggagagagtgaagagattatggcagactctctgccactactgccgcgcatgtacaaatctgtttaacagatcttcttctttaaaatgggacatctcatctttcctgaaatatatatattttttgagacagggtctcttgttctgtcacccaggctagagtgcagtggcatgatcttggctcaccacaacctaaaacccaggttcaaatgaccctcccacctcagcctcctgagtagctgagaacacagatgcatgccactactcctggctattttttttgcctttttggtagagatgggttcttgcttttttgcccaggctggcctcaaactcctgagctcaagcaattcacccacccctgcctcccaaagtgctgggattacagatgtgagccaccgcacccagccttcctgaaatactcttgataattatagttcctgaacagctttcccaagctgttctagccatcccaagaatgttggcaggcttgtccatatgtttggaggtgcaattataatggttcctgggtttcaagctccagtctccatctcccctcagatgcttgctttcccataaggttccatctgactactggaatatcaggggatttccataaagacaagactttgatcttggcaaccctttggtaaatagccagggttctcaatctttgtgcagcaccaaggtatttttaagatgtctgttagtttcgtctcagtgttgtaattccatctaaataaacaatgaggctatctgctggagaaaaggctgaatctaagagcaatgccgccagcatgccctcttcccagaataactccacgctagccattggagcttcattaggtatataagagccctttggtttggtagcctctctggtgtgtgtatagattaaaaccttgacctatatctcctctcccttacttgaatgtttgactttactttgggggcaaaagtttggattgttaggagactatatgctttatatactcttctatgcaataaaaagagattatattaattcactcattgagctttcacagtaatataaaccatattaggcttgtcattctgtcagtgatgggtgtaagtttgtggctttaattagtcataccatcttctgacaaaggcatccttatttctctttccaatttcacagtaatggtgcagaagaaggtctttaccatctgttaaagatgttcagggccgggcatggtggcccacacctataatcccagccctttgggaggcctaggtgggtggatcacttgaggtcaggagttcaagaccagcccggccaacatgctgaaaccctgtctctactaaaaatgcaaaaattagccaagcatagtggtgcacgcctgtagtctcagtcacttgggaggctgaggcatgagaatcctttgaacctgggagatggaggttgcactgagccaagatggtgcctctgcactccagcttgggtgacagaatgagactctgtcaaaaaacaacaacaaaaacaaaatatgttcaggagagatattttgtagagaggaagatattccctagtacctataagtcatctcaaggaagtggtcataccttttctagtgctagaaaagccctactcagagaccttcagtgttttcccacctcctgtcaacctgccttatacttcccatatctccatgtgggaggcatccctgtggagtttgcttagcacttggccatgctttctttgaaaccttaaaagctcttaaagaaagttgccttatgttccctgatgagaagatgaagttggcaaaagaatggtgaaaggcagggatcttgacgagaggcccctgactatccctttagtgatcagcatcttcacttcccatctcattccatgtcctggtggaatggctgcagaagatgagatccagagccagtggcagcacctgaaggagacccttttcatcaacaactgcctgtgagaaaagctagaacgtcatcacagcagctttgatgaagaaaatggtaggagaggcccaagtcagcctgcttctggcaatatgtatttttctaaaggcgtgtgactggggcagagttttatagatttcaaacactttgacatactttacttcacttattcattacaaatgtcccagctagagaggcagggcagctactatcattcctatttataggtaaataaataggcttaaagatatgccttcatcttagaggtatctacttctaaaatcattcttgtgattcctaagctgtctgctgtcttctgtctgctgctgtacactgcctgctgtctctctgcttcttatgtgattggcattcagtagaacccaggtttctgagcacctcacataacagaatgagtctcctctgctgccatcctcatcatcttcccttatgtcttggtgactcttcattctaccaccccaaggtggttctctccaacccccctcctcttagattgttctcacacagaggccatcatttcataacattgtgctgggccagaagaaccataagcaggtcccttcccataccaaagccgtaactattttggaaaagcctccttcatattgcagccattggacatgataatacatgtgatgtgctggcatttgttgagaatcatgtgaaaattaagcttccaccccatcacactaacgttccagccctccacggttttctccctaggctaagatagagaggaagaacatgaaatgtgcagaaagcattctcttaagcaaatgtgtataacttgcataaattgtaataatttcctggaacaggatgcacctctaacctctacaggcaaatcatagattccattgtccagctgtataatgaaaacagagttctcagagaagaataccggagactcccccgacttgcctgaatcaaatttccagaggtaagtggtgaaaggccacaatatgaagtcactctcagatgggtcccttctcttgccacactccactgtagaaataaaagaggacggggaggccagagctgctcaaaaccttataacccacaattctcatagctattctcaacttagagagggctgctttctagacacaccccctccaggcccccagactgccaggctccaggaataagtagctctaagaaatacagtatttcggtgcgagccacaccccactattgcaaattggagaagagaaggacaaacttaaaaggtgaaaagatttaacagaacaacagggtgaaaccccatctctaataaaaatacaaaacttagctgggcgtggtggcatgcacctgtagtcccagctactcaggaggctgaggcaggagaatcatttcaacccaggaggcagacgttgcagcgagccaagtttgcgccactgcattctagcctgagtgacagagcatgattccatctcaaaaaaaaaaagaaaaaaaaaaaagaaaagaaagacagaaaagatttaagagaacaattattttaattgaatacattttgtcaagattaaatcaactttcccctagaatactgaaagaataagcaatcataatttagattctaagttactggcctttgagaaagtgtgaaatccaaaaagatgccgtgagccaaaaaagagcaaaagtcctaattttcaaactgatgaaaataaagtactaaataattgaaatcgtcgtagttcatcttggtccttggcaaaataaaaatttattgattgaaattataatatactagctaccttatcgtgcctagctcttaccactgaggagaaaaaccaaacgcaaacaaaagtatgttcaaattggcaaaaatgtttacaaacctgcaaaatctcttcagcctatcccttaaactgcagacttggtatttactaagctctgctgtgtacaatacccaccttaatatccattcttgcacaagttctgttaggtataagccaaaatcacatgggatttttttttttaccctctcatgcctatgtttgcttttgcttccaaagacccttctgagtaaggactgtcctcagactactggagtcacttagtcacaagcttgcctgaggctcagagctggcaatacctggtagtttatgtcaatcccacatgcaaccctgcctgcaaagtatttacccatgattgacaggtgcaggtgtatgaaagcccagctccttgacttgaggggtgcgtttgtggtgaattagctttgggaaaagggaatccagaggccaactttgtaaaaatccagataggtaaatggagagaaatctttgccttggaagtccagttgagaaagatagtgatttacttcggactgtgaaaagagagactaaaatctttactttctcatgggaaagaagcctatggtgaaagagaaacaaagaaaatggtgggaaatagggtaggtctactcagtagctttaaaccattctgtcatattataaagcctagtaaggttttaactaacacaagtgcctggactctacacatagagattctgatttaaatgcttccaggtgggtggaagacactagtagtcttaaaaagctcccaagtaattttaacatgtagctaaagatgaaaaggacaatctatctactagaatgtcaagtcgccagcataggagtgtcccaaatgtgcagctacctcatagaaaaggcttaaccccacccattgatggaatttgccttcctctctccatggtcttgtttgcatagcatggaaaaaaagagaagagaaaaagaggtagatggatagattgaacctataatttgcctatgtggagcagtttctcaaacttttctgaccacaagatgcagtgagaaatacacaattctttgtgatcagtttttaaaaaatcttttattatgtgtaatccacccttcctagtatttaaataaagcctgtagtagtaagcagtccactatattgatttcacaacccataagttgttcagaattgcaattagaaaatttttaattttggccaggcgtggtggctcgcacctgtaatcccagcaccttgggaggatcacctgaggtcgggagtttgagaccagccggaccaacatggaggaaccctgtctctactaaaaataaaaaaaaaaatttttttttttaaattagctgtgcgtggtggtacctgcctgtaatcacagctacttgggaggatgaggcaggagaattgcttgaaccctgggggtggaggttgtggtgagccaagattgtaccattgcactccagcctgggcaacaagagcaaaactgtctcaaaaaaaaaaaacaaagaaagaaagaaaaagacaaagaaagaaagtaagaaagaaagaaaattttttttcacttttgctcagcctttttatcaaggaaaatcccaaaagaacatttactgtaaaagaacattgactataaacatctttctgtgaatccttatttctgtcccagccaccatgacccaataatctctaaaacctgttagtgttctccagattgaagccttccctctaactgctcctaaatctgtgatgtagtggaaaaggtttgaggccttgattctcatcccgggtttttcacctacagatcatatggccttagcctcttgacaccattgtctccttatggccaaagatggaactgtacttgggtggtatctgagcaccctgttggctttgacattctagggctcttcccttggcaccactctcttatttaaaaggaataggatgtggacttagaagggttatttctctgcaaactatcctctctttcttatgacaagctatttctgaatgtgcacatttgaggctaagcaaatcccttcctgggaggtgtgaaagacctttatttctctccagaggagtattatggatgtggtagagacctggctaactcatctgcagcggctttgagcaaggcttttagaaccataaggtggctggggtcctgtgtcctacaccacaggccagctagttcatttcaggagactttcttttcaatctattattactatcttcttctagactgtagttcactaccagagattatccacttagctgcactcagtttgcacctggcctgtatcaccacttagctctcactctagcctcagttaggtatcagcaagacctcaccaaagattattgtttcgttgtatgtgcgtgtgtgtttttgtttgtttcaagtagcaactaatgttggaactatggaaagttcttctctacttttaacaaagcttagtcacaaacagttccccagttgatgagaaaaactaaaacaacagaacaattgaaagtccaaatctgaaagctccatctctgaaaagcaaattttatagccactccagatttgtattccaaatggacagtttgattgtagaaatcacatcccttcagtctgcaaatgtgataactgcccaagagacagtgatgcctagatccataaataatcccctttcccccaacctatatataactggagtcaacagcagctagaggaaaatggcaaggacttggaatcaagattaagttagaataacactgctgtagactgtttatcagctcttcagcatatgtccactttccttgaaggataagcctttagaaacctctgacaataaagtttattttacacacattctcttgcctatgatttttttgtacaaatcacaattacaaaactttcttgctccagctaaaagcaggaaactcagtcacaaatgtgttcactacatgtataccacagaatgatagcagccagtctgaatgcatcacttgattccaaaattaaatgttagcactcagtagtgaaactacatgtatctccaactctggaagccccaggcaagatactcctgtttcctgcagggaaacagatctataagcagggcagcagtctcacacatgtacattcctgggaaacccaaggaaacaatgatagtgacgcagggcaggcgagcctcaaaactggtttgtagcctgagaaatgtctcccagactgtagtttccttggctttgccaagcaaagaattcaagggcaagccgctggtgaaagcaagcaacttttattgaactggtgctgctacttgcagagcagggctaacccataggcaatgtgcccagagttggtgcctgtgggctgctagctagttgtatttagacccacttttaattacatgccaattaagaggtaggttattcagaacttcctggaaaaggggcagggagtttccagaaccatataaagtaacttccaggccattgccaaggtgtgttgccatgacatttgtaaactggccatggtcccagtggtagtgtctttatgctcataagcagtgagagcaactagaggtcactttcatcatcatctgctggtttcagcaggcttcttcactgcaccctgttttgaccagatcctgctctgttcaatggtccttctggtctcctacctcatttccccatcagagattatatactcctccttaatcttaaggggcttgcagaagggtggaggttcatcttctgtaactgcttcctgctgatgttatgggcatagaccctgtctagcactggagaagtaaaatctctggatacctgttctaaaagacccaaaggcaggatgtctttattttctgggtcagaagaggggatggattgaaagccttgtgccagcatcgtctttacatggaattattgtaatctagaagacacaaactttacaaggaggttaaacaagaaaggaccaaagattagtaataacaagatatctgttaaaggtccgaggaagggtaaaaatcaagtgtctgctggtagagattcctttactgaattccatcagcagggcaaagcggtaagagagaaaacattataattaggagtaagagaaaaactttcatgctcatccacagcatcatgttattaatatttatctgtgcatttgcaaaacaatagctttaagtcttctgggagtttgcaagtataggtcatggcatcttcctctgacatctgtgaggactcataagaatctttgagg

SEQ ID NO: 262 - DNA, 9903 bp, Homo sapiens
gtgatggtccctttggttttggtgcctcttccatgagcttcagatcagaactagctatgtggttccaggctgccttggtttcatcccttgtcttgcctacttcacctggctcaggagggacatcaaggaggaagaaatggataaagtcctggagggacttcaaacagtatttgacccattccagccgccatgactcccaccagcttcgcagcagcaatgccttcctctttgatgcacaggaagacccctctgctctggatatagccagtgagtgctcctttgataagaaaaataaagctccatcaatctctcagtagctcctacattctacatgctcaccacctctgtctaaactgagagatgttattctctgcaggcaggccctaaacattcactttaaaaaagtgattaggctgaacacagctctgggatcaagtctcaagtacaggtccctggtgggtcaggtaatttgctctgttcctgtcctcacctcagtccctctggccccaactggcatctgcaagccagtatactcaaagctggccagaatgaagagagtgaagagattatggcagactctctgccactactgccacacatgtacaaatccgcttaacagatctccttctttaaaatgggacatcttatctttcctgaaatatatatattttttgagacagggtctcttgttctgtcacccaggctagagtgcagtggcatgatctcggctcaccacaacctacaacccagggtcaaatgaccctcccgcctcagcctcctgagtggctgagaccacagatgcatgccactactcccggattttttttgcctttttggtagagacagggtcttgccttgttgcccaggctggcctcaaactcctgagctcaagcaattcacccacccctgcctcccaaggtgctgggattacagatgtgagccaccacacccagccttcctgaaatattcttgataattatagttcctgaacagttttcccaagctgttctagccatcccaagaatgttggcaggcttctccatatgtttggaggtgtaactataatggttcctgggtttcaagctccagtctccatctcccctcaggtgcttgctttcccataagtttccatctgactactagaatatcaggggatttccataaagacaagactttgatcttggcaaccctttggtaaatagccagggttctcaatctttgtgcagcaccaaggtatttttaagatctctgttagtttagtctcagtgttgtaattcaatctaaataaacaacgaggctatctgctggagaaaaggatgaatctaacagcaatgccaccagcatgccctcttcccagaaaaactccacgctagccattggagcttctttaggtatataagagccctttaggttggtaacctcactggtgtgtgtatagattaaaaccttgacctatatctcctctcccttacttgaatgtttgactttactttgggggcaaaagtttggattgttaggggactatatgctttatatactcttctatgcaatagaaagagattgtattaattcactcattgagctttcacagtaatataaaccatattaggcttgtcattctgtcagtgatgggtgtaagtttgtggcttttattactcataccatcctctgacaaaggcatcctatttctctttccaatttcacaataaggtgcagaagaaggtctttaccatctgttaaagatgttcagggccgggcatggtggctcacacctataatcccagccctttgtgaggcctaggtgggtggatcacttgaggtcatgagtttgagaccagcctggccaacatgctgaaaccccgtctctactaaaaatgcaaaaattagccaagcatagtggtgcatgcctgtagtctcagccacttgggaggctgaggcatgagaatcctttgaacctgggagatggagtttgcagtgagccaagatggtgcctctgcactccagcttgagtgacagaatgagactgtcaaaaaacaacaacaacaacaaaagatgctcaggagagatgttttgtagagaggaagatattccctagtacccataaatcatctcaaggaggtggtcatatctttcctagtgctagaaaagccctattcagaaaccttcagtgtttttccacctcctgtcaacctgccttatacttcctgtatctccatgtgggaggcatccctgtggagtttgcttagcacttggccatgctttgtttgaaaccttaaaagctcttaaaggaagttgccttatgttccctgatgagaagatgaagttggcaaaagaatggtgaaaggcagggatcttgatgagaggcccctgactatccctttagtgatcagcatcttcatttcccgtctcattccatgtcctggtggaatggctgcagaagatgagatccagagacagcggtagcacctgaaggaaacccttttcatcaacaactgcctgtgagaaaagctggaatgtcatctcagcagctttgatgaagaaaatggtgggagaggcccaagtcagtgcttctggcaatatgtatttttctaaaggcatgtgactggggcagagttttatagatttcaagcactttgacatactttacttcacttattcattacaaatgtcccagctagagaggtagggcagctactatcattcctatttataggtaaataaataggcttaaagatttgcctccaacttagaggtatctacctctaaaatcattcttgtgattcctaggctgtcttctgtcttctatctgctgctgtacactgcctgctgtctctctgcttcttatgtgattggcattcagtagaacccaggtttctgagcacctcatgtagcagaatgagagtctcctctgctgccatactcatcagcttcccttatgtctcggttactcttcattctaccaccccaaggtggttctctccaacccccctcctcttagattgttctcacacagaggccatcatttcataacattgtgctgggccggaagaaccataaccaggtcccttcccataccaaagcagtaactattttggaaaagcctccttcatattgcagccattggacatgataatacatgtgatgtgctggaatttgttaagaatcatgtgaaaattaagcttctgccccatcgcactaaagttccagccctgagtccccatggttttctccctaggctaagatagagaggaagaacatgaaatatgcagaaagcattctcttaagcaaacgtgtataatttgcctaaattgtaattatttcctggaacagcatgcacctctaaactctacaggcacatcatagattccatcgtccagctgtataatgaaaacagagttctcagagaacaccggagactcccccgacttgcctgaatcaagtttctagaggtaagcggtgaaaatccacaatatgaagtcactctcagacgggtcccttctcttgtcacactccactgtagaaacaaaagaggacggggaagccagagctgctcaaaaccttataacccacaattgtcatagttattctcaacttacacagggctgctttctagacgcaccccctccaggcccccagactgccaggctccaggaataagtagctctgagaaatatagtttttcggtggaagccacactccactattgcaaattggagaagagaaggacaaacttaaaaggtgaaaagatttaagagaacaacatggtgaaaccccatctctactaaaaatacaaaaattagctaggcgtggtgacatgcacctgtagtcccagctactcaggaggctgaggcaggagaatcatttcaacctgggaggcggaggttgcagtgacccaagattgctccactgcactctagcctgggtgacagagcaagactccctctcaagaaaaaaagaagaaagaaagaaagaagaaagaaaacaattgttttagttgaatacattttgtcaagattaaatcaactttcccctagggtactgatagaataagcaatcataatttagattctaacttactggtctttgagaaattgtgaaaacaaaaaaggtgccataagccaaaaaaggagcaaaagtcctaattttcaagctgatgaaaataaagaatgaaaaatattgaaatcgtcatagttcatcttggtccttggcaaaatacaaatctattgattgaaaatataatatcctagctaccttattgtgcctagctcttaccactgaggagaaaaaccaaacgcaaacaaaagtatgttcaaattggcaaaaatgtttacaaacctgcaaaatctcttcagcctatccctcaaactccagacttggtatttactaagctctgctgtgtacaatacccaccttaatatccattcttgcacaagttctgttaggtataagccaagatcacatgggattttttttttttttttttttaccctctcatgcctatgtctgcttttgcttccaaagacccttctgagtaaggactgtcctcagactactggagtcatttagtcacaagcttgcctgaggctcagagctggcaatacctgggagtttatgtcaatcccacagcacccagcaaccttgcctgcaaattatttacccatgattgacaggtgcaggtgtatgaaagtccagctccttgacttgaggggtgcctttgtggtgaattagctttgggaaaagggaatccagaggccaactttgtaaaactccagatagataaatggaaagaaatctttgccttggaagtccagttgagaaagatagtgatttacttcagactgtggaaagagagactaaaatctttactttctcatgggaaagaagcctatggtgaaagagaaacaaagagaatggtgggaaatagggtgggtctactcagtagctttaaaccattctgtcatattataaagcctggtgaggttttaacacaagtgcctggactctacacctagagattctgatttaaatgcttccaggtgggtggaagccactagtagtcttaaaaagctcccaagtaattttcacatgtggctagagatgaaaaggaccatctatctattagaatgtcaagtcgccaacatagaagtgtcccaaatgtacagctacctcatagaaaaggcttaacaccacccattgatggaattttccttcctctcgccatggttttgtttgcatagcatggaaaaaagagaagagaaaaagaggtagatggatagattgaacctataatttgcctatgtagagcagtttctcaaacttatctgaccacaagatgcagtgagaaatatacaattctttgtgatcagtttttaaaaaatctttcattatgtgtaatccaaccttcctagtatttaaataaagcctgtagtagcaagcagtccactatattgatttcacaacccataacttgttcagaattgcaattagaaattttttttggccaggcttggtggcttgagcctgtaatcccagcactttgggaggatcacctgaggttgggagtttgagatcagcctgaccaacatggaggaaccccatctctactaaaaatacaaaaaaaaaaaaattacctgggtgtggtggtgcctgcctgtaatcacagctacttgggaggctgaggcagaattgcttgaaccctgggggtggaggttgtggtgagccaagattgcaccattgcactccagcctgggcaacaagagcgaaattgtttcaaaaaaaaaaagcaaaaagaaaagaaaaagaaagaaaaaaagaaaaaaatttttttcacttctgctcaacctttttatcaagcaaaatctcaaaagaacatttactgtaaaagaacattgacaacaaacatctttctgtgaatccttatttctgtcccagccaccatgacccaataatctctagagcctgttagtgttctccagattgaagccttccctctaactgctcctaaatctgtgatgtagtggaaaaagtttgaggccttgattctcatcccaggtttttcacctacagatcatatggccttagcctcttgacaccattgtctccttatggccaaagatggaactgtacttgggtggtatctgagcaccctgttggctttgacattctagggctcttcccttggcaccactctcttatttaaaaggaataggatgtggacttaggagggttatttctctgcaaactatcctctctttcttatgacagctatttctgaatgtgcacatttgaggctaagcaaatcccttcctgggaggcgtgaaagacctttatttctctgcagaggagtattatggaaagtcagttgatgctgaggaggtggtagagacctagctaactcatctgcagcggctttgagcaaggcttttagaatcataaggtggctggggtcctgtgtcctacaccacaggccagctagttcatttcaggagactttcttttctatctattattactatcttcttctagactgtagttcactaccagagattatccacttagctgcactcagtttgcacctggcctgtatcaccacttagctctcactccagcctcagttaggtatcagcaagacctcaccaaagattattgtttcattgtatatgtgtgtgtgtttttgtttgtttcaggtaacaactgatgttggaactatgaaaagctcttctctacttttaacaaagcttagtcacaaacagttccccagttgacgagaacaactaaaacaacagaacaattgaaagtccaaatttgaaagctccatctccgagaagcaaattttacagccactccagatttgtattccaaatggatagtttgattataaaaatcacatcccttcagcctgcaaatgtgataactgcccaagagacagtgatgcctacatccatagataatcccctttcccccaacctatatataactggagtcaacagcagctggaggaaaatggcaaggacttgtaatcaagattaagttagaaaaacactgctgtagactgtttatcagctcttcagcatatgtccgttttccttgaaggatgagcgtttagaaacctctgacaataaagtttattttacacacattctcttgcctatcatttttttttgtacaaatcacaattataaaactttcttgctccagctaaaagcaggaaactcagtcacaaatgtgttcactacatgtataccacagaatgatagcaaccagtctgattgcatcacttgattccaaaattaaatgttagcactcagtagtgaaactacatgtatctccaactctggaagccacaggcaagatactcctgtttcctgcagggaaacagatctataagcagggcagcagtctcacacatgtacactcctgtgaaatccaaggaaataatgatagtgacacagggcaggcaagccccaaaactggtttgtagcgtgggaaatttctcccagactgtagtctccttggctttgccaagaaaagaattcaaggataagccgctggtgagagaaagcaacttttattgaactggtgctacttcttgcagagcagggctaacctataggcagtgtgcccagagttggtgcctgtgggctactagctagttgtatttagagccacttttaattgcatgccaattaagaggtaggttattcagaactttctgggaaaggggcagggagtttccagaaccatataaagtaacttccaggccattgccaaggtgtgttgccatgacatttgtaaactggccatggtcccagtggtagtgtctttatgctcataagcagtgagggcaactagaggtcactttcatcatcatctgctggtttcagcaggcttctccactgcaccctgttttgaccagatcctgctctgttcaatggggttgggaatggaaaataagtccttctggtctcctacctcatttccccatcagagattatatactcctccttaatcttaaggggcttgcagaagggcggaggttcatcttctgtaactgcttcctgctgatgttatgggcatagaccctgcctagcactggagaggtaaaatccctggatacctgttctaaaaggctcaaaggtaggatgtctttatcttctgggtcagaagaggggatgggttgaaagccttgtgccagcatcatctttacatggaattattgtaatctggaagacacaaactttacaaggaggttaaacaagcaaagagcaaagattagtaataaaaagatatctattaaaggtcctaggaagggtaaaaaccaagtgtctgctggtagagattcctttactgaattccatcagcagggcaaagcagtaagagggaaaacattataattaggaataagagaaaaactttcatgctcatccacagcatcatgttattattgttatctgtgcatttgcaaaacaatagctttaagtcttccgggcgtttgcaaatataggtcacagcatcgtcctctgacatctgtgaggactcataacaatctttgagggccgggggcggtggctcacgcctgtaatcctaatactttgggagactgaggagggcggatcacgaggtcaggagatcgagaccatcctggctaacatggtgatatcccgtctctactgaaaatacaaaaaaaattagccaggagtggtggcgggcgcctgtagtcccagctactcgggagcctgaggcaggagaatggcgtgaacccgggaggcagagcttgcagtgagttgagatcgcgccactgcactccagcctggggacacagtgagactccatttgaaaaaaaaaaaaaggatctttgagcctgggcatagtggctcatgcctgtaatcccagcactttgggaggctgaggcaggcatttcacaaggtcaggagttcaagaccagcctggccaacatggtgaaacctcgtcgctactaaaaatacaaaaaaaaaaaaaaaaaaaattagtcaagcatggtggcacgtgcctgtaatcccagctactcaggaggctgaggcaggagaattgcttgaacccagaaggtggaggttgcagtgagccgagatcgagccattgcactccagcctgggtgacagagcaagatttcatctaaaaaaaaaaaaaacaaaattaactttgaagtttaacagcagtgggggtgcttaataatgcctgataggggccctttccattttggttgtaattgattcttgggggattcttctttctaagtttttagtaagactaagtatcctggttgaatgggcgagtcaatccttttccttgtgggaggaggttacgtttcacttccatatgattgaagggccttttgaacctggcctaagttgataacctatgtatctcttcaacaaacagaacgtctaaagttaaaaagggccttccgagctgctcaggcgacccagcctcccatcgctgctgctctagtgttcggttggcctgggccacactcaactgtagggagcccaggccaagaggcagcctgggccttctgcattgcgaggcgccgggcctcccgcagcgctccgctgacgggctgcgggcgggcaggcgggaggcctagtgtgggtcgcggtcgtggcccccgccgccggccctggccgccgcatcatgaacatagatgtggagttccacatccggcacaactatacctggaacaagttgccggccaatgtgagacagtcattaagtggagatggctcatcatggaggtcttcatccttgtcttcacaagtaggctgaagaggaggaaatacaggatgtattggtcttgctgttcagggtggtagaggaggaagaaaatcccagtcgtctttgaaattcacagagaatatgaaaagcagg

SEQ ID NO: 263 - DNA, 9620 bp, Homo sapiens
  SITE (6398): n equals a,t,g, or c
gtgatggtccctttggttttggtgcctcttccatgagcttcagatcagaactagctatgtggttccaggctgccttggtttaatcccttgtcttgcctacttcacctggctcaagagggaagtccaggaggaagaaatggatgaagtcctggaggactcactagatgaacagtatttgactcattccagctgccatgactcccaccagcttcccagcagcaatgccttcctctttgatgcacaggaaggccccttggctgtggaaatagccagtaagtgctcctttgataagaaaaataaagctccatcaatctctcagtagctcctacattctacatgctcaccacctctgtctaaactgagagatgttattctctgcaggcaggccctaaacattcactttaaaaaactgattaggctgaacacagctctgggatcaactctcaagtacaggtccctggtgggtcaggtaatttgctctgttcctgtcctcacctcagtccctctggtccagaccggcatctgcaagccggtatactcaaagcaggccagaatggagagagtgaagagattatggcagactctctgccactactgccgcgcatgtacaaatctgtttaacagatcttcttctttaaaatgggacatctcatctttcctgaaatatatatattttttgagacagggtctcttgttctgtcacccaggctagagtgcagtggcatgatcttggctcaccacaacctaaaacccagggtcaaatgaccctcccacctcagcctcctgagtagctgagaacacagatgcatgccactactcctggctattttttttgcctttttggtagagatgggttcttgcctttttgcccaggctggcctcaaattcctgagctcaagcaattcacccacccctgcctcccaaagtgctgggattacagatgtgagccaccgcacccagccttcctgaaatattcttgataattatagttcctgaacagttttcccaagctgttctagccatcccaagaatgttggcaggcttgtccatatgtttggaggtgcaattataatggttcctgggtttcaagctccagtctccatctcccctcaggtgcttgctttcccataaggttccatctgactactggaatatcaggggatttccataaagacaagactttgatcttggcaaccctttggtaaatagccagggttctcaatctttgtgcagcaccaaggtatttttaagatgtctgttagtttcgtctcagtgttgtaattcaatctaaataaacaacgaggctatctgctggagaaaaggctgaatctaagagcaatgccaccagcatgccctcttcccagaatagctccacgctagccattggagcttctttaggtatataagagccctttaggttggtagcctctctggtgtgtgtatagattaaaaccttgacctatatctcctctcccttacttgaatgtttgactttactttgggggcaaaagtttggattgttaggagactatatgctttgtatactcttctatgcaataaaaagagattatattaattcactcattgagctttcacagtaatataaaccatattaggcttgtcattctgtcagtgatgggtgtaagtttgtggctttaattagtcataccatcttctgacaaaggcatccttatttctctttccaatttcacagtaaggtgcagaagaaggtctttaccatctgttaaagatgttcagggccgggcacggtggcgcacacctataatcccagccctttgtgaggcctaggtgggtggatcacttgaggtcaggagttcaagaccagcctggccaacatgctgaaaccccgtctctactaaaaatgcaaaaattagccaagcatagtggtgcacgcctgtagtctcagccacttgggaggctgaggcatgagaatcctttgaacctgggagacggaggttgcactgagccaagatggtgcctctgcactccagcttgggtgacagaatgagactctgtcaaaaaacaacaacaaaaacaaaatatgttcaggagagatattttgtagagaggaagatattccctagtacctataagtcatctcaaggaggtggtcataccttttctagtgctagaaaagccctactcagagaccttcagtgttttcccacctcctgtcaacctgccttatacttcccatatctccatgtgggaggcatccctgtggagtttgcttagcacttggccatgctttctttgaaaccttaaaagctcttaaaggaagttgccttatgttccctgatgagaagatgaagttggcaaaagaatggtgaaaggcagggatcttgacgagagacccctgactatccctttagtgatcagtatcttcacttcccatctcattccatgtcctggtggaatggctgcagaagatgagatccagagccagtggcagcacctgaaggagacccttttcatcaacaactgcctgtgagaaaagctagaacgtcatcacagcagctttgatgaagaaaatggtaggagaggcccaagtcagcctgcttctggcaatatgtatttttctaaaggcatgtgactggggcagagttttatagatttcaagcactttgacatactttacttcacttattcattacaaatgtcccagctagagaggcagggcagctactatcattcctatttataggtaaataaataggcttaaagatttgccttcatcttagaggtatctacctctaaaatcattcttgtgattcctaagctgtctgctgtcttctgtctgctgctgtacactgcctgctgtctctctgcttcttatgtgattggcattcagtagaacccaggtttctgagcacctcacatagcagaatgagagtctcctctgctgccatcctcatcagcttcccttatgtcttggtgactcttcattctaccaccccaaggtggttctctccaacccccctcctcttagattgttctcacacagaggccatcatttcataacattgtgctgggccagaataaccataagcaggtcccttcccataccaaagcagtaactattttggaaaagcctccttcatattgcagccattggacatgataatacatgtgatgtgctggcatttgttgagaatcatgtgaaaattaagcttccaccccatcacactaacgttccagccctccacggttttctccctaggctaagatagagaggaagaacatgaaatgtgcagaaagcattctcttaagcaaacgtgtataacttgcataaattgtaattatttcctggaacaggatgcacctctaacctctacaggcaaatcatagattccattgtccagctgtataatgaaaacagagttctcagagaagaataccggagactcccccgacttgcctgaatcaaatttccagaggtaagtggtgaaaggccacaatatgaagtcactctcagatgggtctcttctcttgccacactccactgtagaaataaaagaggacggggaggccagagctgctcaaaaccttataacccacaattctcatagttactctcaacttagagagggctgctttctagacacaccccctccaggcccccagactgccaggctccaggaataagtagctctaagaaatacagtatttcagtgtgagccacaccccactattgcaaattggagaggagaaggacaaacttaaaaggtgaaaagatttaacagaacaacagggtgaaaccccatctctaataaaaatacaaaacttagctgggcgtggtggcatgcacctgtagtcccagctactcaggaggctgaggcaggagaatcatttcaacccaggaggcagacgttgcagcgagccaagtttgcgccactgcattctagcctaagtgacagagcatgactccatctcaaaaaaaaaaagaaaagaaagacagaaaagatttaagagaacaattattttaattgaatacattttgtcaagattaaatcaactttcccctagaatactgaaagaataagcaatcataatttagattctaagttactggactttgagaaagtgtgaaatccaaaaagatgccatgagccaaaaaagagcaaaagtcctaattttcaaactgatgaaaataaagtactaaataattgaaatcatcgtagttcatcttggtccttggcaaaataaaaatttattgattgaaattataatatcctagctaccttattgtgcctagctcttaccactgaggagaaaaaccaaacgcaaacaaaagtatgttcaaattggcaaaaatgtttacaaacctgcaaaatctcttcagcctatcccttaaactgcaggcttggtatttactaagctctgttgtgtacaatacccaccttaatatccattcttgcacaagttctgttaggtataagccaaaatcacatgggattttttttttttaccctctcatgcctatgtttgcttttgcttccaaagacccttctgagtaaggactgtcctcagactactggagtcacttagtcacaagcttgcctgaggctcagagctggcaatacctggcagtttatgtcaatcccacatgcaaccctgcctgcaaagtatttacccatgattgacaggtgcaggtgtatgaaagcccagctccttgacttgaggggtgcgtttgtggtgaattagctttgggaaaagggaatccagaggccaactttgtaaaaatccagataggtaaatggagagaaatctttgccttggaagtccaattgagaaagatagtgatttacttcggactgtgaaaagagagactaaaatctttactttctcatgggaaagaagcctatggtgaaagagaaacaaagaaaatggtgggaaataggataggtctactcagtagctttaaaccattctgtcatattataaagcctggtaagggttttaactaacacaagtgcctggactctacacatagagattctgatttaaatgcttccaggtgggtggaagacactagtagtcttaaaaagctcccaagtaattttaacatgtagctaaagatgaaaaggacaatctatctactagaatgtcaagtcgccagcataggagtgtcccaaatgtgcagctacctcatagaaaaggcttaaccccatccattgatggaatttgccttcctctctccatggtcttgtttgcatagcatggaaaaaaagagaagagaaaaagaggtagatggatagattgaacctataatttgcctatgtggagcagtttctcaaacttttctgaccacaagatacagtgagaaatacacaattctttgtgatcagtttttaaaaaatcttttattatgtgtaatccacccttcctggtatttaaataaagcctgtagtagtaagcagtccactatattgatttcacaacccataagttgttcagaattgcaattagaaaatttttaattttggccaggcgtggtggctcgcacctgtaatcccagcaccttgggaggatcacctgaggtcgggagtttgagaccagcctgaccaacatggaggaaccctgtctctactaaaaattaaaaaaaaaatttttttttaattagctgggtgtggtggtacctgcctgtaatcacagctacttgggaggctgaggcaggagaattgcttgaaccctgggggtggaggttgtggtgagccaagattgtaccattgcactccagcctgggcaacaagagcaaaactgtctcaaaaaaaaaaaaaagaaagaaagaaagaaaaaaaaagacaaagaaagaaagaaaaagacaaagaaagaaagtaagaaagaaagaaaattttttttcacttttgctcagcctttttatcaaggaaaatcccaaaagaacatttactgtaaaagaacattgactataaacatctttctgtgaatccttatttctgtcccagccaccatgacccaataatctctaaaacctgttagtgttctccagattgaagccttccgtctaactgctcctaaatctgtgatgtagtggaaaaggtttgaggccttgattctcatcccaggtttttcacctacagatcatatggccttagcctcttgacaccattgtctccttatggccaaagatggaactgtacttgggtggtatctgagcaccctgttggctttgacattctaagggctcttcccttggcaccactctcttatttaaaaggaataggatgtggacttacaagggttatttctctgcaaactatcctctctttcttatgacaagctatttctgaatgtgcacatttgaggctaagcaaatccctttcctgggcagggtgtgaaagacctttatttctctncagaggagtattatgggaggtggtagagacctagctaactcatctgcagtggctttgagcaagggctttagagccataaggtggggctgggtcctgtgtcctacaccacaggccagctagttcatttcaggagactttcttttcaatctattattactatcttcttctagactgtagttcactaccagagattatccacttagctgcactcagtttgcacctggcctgtatcaccacttagctctcactctagcctcagttaggtatcagcaagacctcaccaaagattattgtttcgttgtatgtgtgtgtgtgtttttgtttgtttcaagtagcaactaatgttggaactatggaaagttcttctctacttttaacaaagcttagtcacaaacagttccccagttgatgagaaaaactaaaacaacagaacaattgaaagtccaaatctgaaagctccatctctgagaagcaaattttatagccactccagatttgtattccaaatggatagtttgattgtagaaatcacatcccttcagtctgcaaatgtgataactgcccaagagacagtgatgcctagatccataaataatcccctttcccccaacctatatataactggagtcaacagcagctagaggaaaatggcaaggacttggaatcaagattaagttagaataacactgctgtagactgtttatcagctcttcagcatatgtccattttccttgaaggataagcctttagaaacctctgacaataaagtttattttacacacattctcttgcctatgatttttttgtacaaatcacaattacaaaactttcttgctccagctaaaagcaggaaactcagtcacaaatgtgttcactacatgtataccacagaatgatagcagccagtctgaatgcatcacttgattccaaaattaaatgttagcactcagtagtgaaactacatgtatctccaactctggaagccccaggcaagatactcctgtttcctgcagggaaacagatctataagcagggcagcagtctcacacatgtacattcctgggaaacccaaggaaacaatggtagtgacgcagggcaggcgaacctcaaaactggtttgtagcctgagaaatttctcccagactgtagtttccttggctttgccaaggaaagaattcaaggtcaagccgctggtgaaagaaagcaacttttattgaactggtgctgctacttgcagagcagggctaacccataggcagtgtgcccagagttggtgcctgtgggctgctagctagttgtatttagacccacttttaattacatgccaattaagaggtaggttattcagaactttctggaaaaggggcagggagtttctagaaccgtataaagtaacttccaggccattgccaaggtgtgttgccatgacatttgtaaactggccatggtcccagtggtagtgtctttatgctcataagtagtgagagcaactagaggtcactttcatcatcatctgctggtttcagcaggcttctccactgcaccctgttttgaccagatcctgctctgttcaatggggttgtgactggaaaataagtctttctggtctcctacctcatttccccatcagagattatatactcctccttaatcttaaggggcttgcagaagggtgcaggttcatcttctgtaactgcttcctgctgatgttatgggcatagactctgcctagcactggagaagtaaaatctctggatacctgttctaaaagacccaaaggcaggatgtctttattttctgggtcagaagaggggatgggttgaaagccttgtgccagcatcatctttacatggaattattgtaatctagaagacacaaactttacaaggaggttaaacaagcaaggaccaaagattagtaataacaagatatctgttaaaggtcctaggaagggtaaaaatcaagtgtctgctggtagagattcctttattgaattccatcagcagggcaaagcggtaagagagaaaatattataattaggagtaagagaaaaactttcatgctcatccacagcatcatgttattaatatttatctgtgcatttgcaaaacaatagctttaagtcttctgggagtttgcaagtataggtcatggtatcttcctctgacatctgtgaggactcataagaatctttgaggctgggcacagtggctcatgcctgtaatcgcagcactttgggaggctgaggcaggcatttcacaaggtcaggagttcaagaccagcttggccaacatggtgaaacctcatctttactaaaaatacacacacacaaaaaaaaaaattagccaagcctggtggcacgtgcctgtaatcccagctactcaggaggctgagacaggaggattgcttgaacccagaaggtggaggttgcagtgagccgagatcgagccattgtactccagcctgggcgacagagcaagacttcttaaaaaaaaaaaaaaaaattaactttggagtttaacagcagtgggagtgtttaataatgcctgataggggccctttctattttggttgtaattgattcttgggggatccttctttctaagtttttagtaagactaagtctcctggttgaatgggggagttaatccttttccttgtgggaggttacgtttcatttccatattttgaacctggcctaagttgataatctatgtgtctcttcatcaaacagaaggtctaaagttaaaaagggccttccgagctgctcaggcgacccagtgctcggttggcccgggccgcgcttaactgtcccaggtcagttaagcccatgggagcccaggtcatggggcagccagggcctctgcagtgtgaggcgccggtctgcgggcgggcaggcgggaggcttagggtgggtcgcggtcgcggcccccgccgcaggccctggcggcggcatcgtgaacatagacgtggagttccacatccggcacaactacccctggaacaatttgccggccaatgtgaggcagtcattaagtggagatagctcatcatggaggtcttcatctttgtcttcacatcaagtaggctgaggaggaggaaatacaggaagtattggtcctgctgttcagagtggcagaggagaaagaaaatcccagccgtgttggaaattcacagagagaatatgaaaatcaggttgtcctgtacagtatctgcaatcag

SEQ ID NO: 264 - DNA, 453 bp, Homo sapiens; identical to SEQ ID NO: 258

SEQ ID NO: 265 - DNA, 455 bp, Homo sapiens
aggtaacaactaatgttggaattatgaaaagctcttctctacttttaacaaagcttagtcacaaacagttccccagttgatgagaaaaactaaaacaacagaacaattgaaagtccgaatctgcaagttcatctctgagaaccgaattttacagccactccagatttgtactccaaatggatagtttgattgtagaaatcacttcccttcagtctgccaatgtgataactgcccaagagaaagtgatgcctacattcgtagataatcccctttcccccatcctatatataactggagtcaacagtagctggaggaaaatggcaagaacttggaatcaagattaggttagaataacactgctgtagacagtttatcagctcttcagcatatgtccattttccttgaaggatgagcctttagaaacctctgacaataaagtttattttacatccatt

SEQ ID NO: 266 - DNA, 455 bp, Homo sapiens; identical to SEQ ID NO: 265

SEQ ID NO: 267 - DNA, 454 bp, Homo sapiens
ggtaacaactaatgttggaactatgaaaagctcttctctacttttaacaaagcttagtcacaaacagttccccagttgatgagaaaaactaaaacaacagaacaattgaaagtccaaatctgcaagctcatctctgagaaccgaattctacagccactccagatttgtactccaaatggatagtttgattgtagaaatcacatcccttcagtctgccaatgtgataagggcccaagagacagtgatgcctagattcatagataatcccctttcccccatcctatatataactggagtcaacagcagctggaggaaaatggcaagaacttggaatcaagattaggttagaataacactgctgtagacagtttatcagctcttcagcatacgtccgttttccttgaaggatgagcctgtagaaacctctgacaataaagtttattttacacccatt

SEQ ID NO: 268 - DNA, 446 bp, Homo sapiens
actaatgttggaattatgaaaagctcttctctacttttaacaaagcttagtcacaaacagttccccagttgatgagaaaaactaaaacaacagaacaattgaaagtccgaatctgcaagttcatctctgagaaccgaattttacagccactccagatttgtactccaaatggatagtttgattgtagaaatcacttcccttcagtctgccaatgtgataactgcccaagagaaagtgatgcctacattcgtagataatcccctttcccccatcctatatataactggagtcaacagtagctggaggaaaatggcaagaacttggaatcaagattaggttagaataacactgctgtagacagtttatcagctcttcagcatatgtccattttccttgaaggatgagcctttagaaacctctgacaataaagtttattttacatccat

SEQ ID NO: 269 - DNA, 454 bp, Homo sapiens; identical to SEQ ID NO: 267

SEQ ID NO: 270 - DNA, 379 bp, Homo sapiens
ccaataaagccagtggaaattgccatagaggcatggtgggtggtgcaggctggatatatcacagaagatgacatcaagatatgcacttggcctgagaaatgtgctactgataagaccgttgattcaggccctcaactctctggatcactagattacaatgtagtacatagtttgtataaaaaaggatttatttatctggatgtaccaatgtctgatgacagttgtatagcagttgcaccccttgaaggttttgtaatgaatcgagtgcttattttgattattttgaaactctactctataagatatttgtttcagtagatgagcacacaaatgtggcagagcttgcaaatgtccttgagattgacttatccctggttaa

SEQ ID NO: 271 - DNA, 2288 bp, Homo sapiens
ttttttttttttaccctctcatgcctatgtttgcttttgcttccacagacccttctgagtaaggactatcctcagactactggagtcatttagtcacaagcttgcctgaggctcagagctggcaatacctgggagtttacgtcaatcccacagcacccagcaaccctgcctgcaaaatatttacccatgattgacaggtgcaggtgtatgaaagcccagctccttgacttgaggggcacctttgtggtgaattaggtttgggaaaagggaatccagaggccaactttgtaaaaatgcagatagataaatagaaagaaatctttgccttggaagtccagttgagaaagagagtgatttacttgagactctgaaaacagagactaaaatctttactttctcatgggaaagaagcctatggtgaaagagaaacaaagagaaaggtaggaaatagggtgggtctactccgtagctttaaaccactctgtcatattataaagcctggtgaggttttaactaacacaagtgcctggactctacacatagagattctgatttaaatgcttccaggtgggtggaagccactagtagtcttaaaaagctcccaagtaattttaccatgtggctagagatgaaaaggacaatctgtctactagaatctcaagtaaccagtattgaagtgccccaaatgtgcagctacctcatagaaaaggcttaacagcacccattgatggaatttgccttcctctctccgtggtcttgtctgcatagcgtggaaatagagaagagataaagaggtagatggagagattggacctgtaatttgcctatgtagagtagtttctcaaacttttctgaccacaagatgcagtgagaaatatacaattctttgtgatcagttttttttttctttttttgagatggagtcttgctctgttgcccaggttggagtgcattggtgtgaccttggcttactgcaagctccgccctcccgggtttacaccattctcctgccttagcgtcctgagtagctgggactacaggcacccaccaccatgcccagctaatttttttttttttttttatttttagtagagacggggtttcaccgtgttagccaggatggtctcaatctcctgaccgcgtgatccacctgcctcagcctcccaaagtgctgggattacaggcatgagccaccgcgcctgtcctgtgatcagtttttaaaaaatcttttactatgtgtaatccaccctacctagaatttaaataaagcctgtagtaataagcagtccactatattgatttcacaacccctaagtggttcagaattgcaattagaaaatttttacttttggccgggtgtggtggctagagcctgtaatcccagcactttgggaggatcacttgaggttgggagtttgagaccagcctgaccaacatggaggaaccctgtctctactaaaaaaaaaaaaaaaaaaaaaaaaaaattagctgggcgtggtggtgcatgcctgtaatcacacctacttgggaggctgaggcaggagaattgcttgaaccccagggggtggaggttgtggtgagctgagtttgcaccattgcactccagcctgggaaacaagagtgaaactgtctaaacaaaaaaaaaaaaaaaaagaaaaaagaaaagaaatacatttttacttttgctcagcctttttatcaagcaaaatcccaaaagaacatttactataaacatctttctgtgaatccttatttctgtcccagccaccatgacccaataatctctagagcctgttagtgttctccagattgaagccttccctctaactgctcctaaactctgtgatgtagtggaaaaggtttgaggacttgattcccatcccagatttttcacctacagatcatacggccttagcctcttgacaccattgtctccttatggccaaagatggaactgtacttgggtggtatctgagcaccctgttggctttgacattctagggctcttcccttgtcaccactctcttatttaaaaggaataggatgtggacttaggagggttatttctctgcaaactatcctctctttcttacgacaagctattcctgaatgtgcatatttgaggctaagcaaatcccttcctgggaggttgaaagacccttatttctctccagaagagtattatggagagtcaattgatgctgaggaggtggtagagacctagcgaactcaactgcagtggctttgagcaaggctcttagaatcataaggtgggtggggtcctgtgt

SEQ ID NO: 272 - DNA, 246 bp, Homo sapiens
tccacatccggcacaactacccctggaacaagttgccggccaacgtgaggcagtcattaagtggagatagctcatcatggaggtcttcatctttgtcttcacatcaagtaggctgaggaggaggaaatacaggaagtattggtcttgctgttcagagtggcagaggagaaagaaaatcccagccgtcttggaaattcacagagagaatatgaaaatcaggttgtcctgtacagtatctgcaatcag

SEQ ID NO: 273 - DNA, 579 bp, Homo sapiens
aaaaggcagaaactgctgattgttcctttttttgttgactgattatacaatgtgtccttttaaaaatggttctctgttctctttgcagttgttgtattggttcctagttcctagtaatttctcacacttagttaaccagtcagtcttaccgaaaagtaaactaaccagggatccctggtttctgtatctttaaaacctatagggttacaaaccaaagtgagatgcctatctggtttctgcacagttgtcctgaattatgttggcagatattttatagccagaaatttaccttgaaaaataaattgaaaccataccaagtatttagagctaggggtctaaaatctgcaaaagccgtgggaggttgtgttgtctcaagagccagtattcagtggaccactccacatcatatcaaataaaatttaaacacagcattttgaagccgacagtatgggtcactgtgtgtcctgtgtgccgtgagcgtattgtagagtagttgttgagtctgctgccttatctgtgtgttatgaggtcaatgcactgatcacttgcttttttcacttctatactaactctaggcac

SEQ ID NO: 274 - DNA, 2277 bp, Homo sapiens
ttttttttttttaccctctcatgcctatgtttgcttttgcttccacagacccttctgagtaaggactatcctcagactactggaggcacttagtcacaagcttgcctgaggctcagagctggcaatacctgggagtttatgtcaatcccacagcacccagcaaccctgcctgcaaaatatttacccatgattgacaggtgcaggtgtatgaaagcccagctccttgacttgaggggcacctttgtggtgaattaggtttggcaaaagggaatccagaggccaactttgtaaaaatgcagatagataaatagaaagaaatctttgccttggaagtccagttgagaaagagagtgatttacttgagactctgaaaacagaggactaaaatctgtactttttcatgggaaagaagcctatggtgaaagagaaacaaagagaaaggtaggaaatagggtgggtctactccgtagctttaaaccactctgtcatattataaagcccggtgaggttttaactaacacaagtgcctggactctacacatagagattctgatttaaacgcttccaggtgggtggaagccactagtagtcttaaaacactcccaagtaattttaccatgtggctagagatgaaaaggacaatctatctactagaatctcaagtaaccattattgaagtgccccaaatgtgcagctacctcatagaaaaggcttaacaccaccctttgatggaatttcccttcctctctccatggtcttgtctgcatagcatggaaaatagagaagagataaagaggtagatggagaggttgaacctgtaatttgcctatgtagagcagtttctcaaacttttctgaccacaagatgcagtgagaaatatacaattctttgtgatcagttttttttttttttttttttttttttttgagatggagtcttgctccgttgcccaggctggagtgcattggaatgatctcggctcactacaagccccaccctcctgggttcacaccattctcctgccttagcgtcctgagtaggtgggactacaggcacccaccaccatgcccagctaattttttttttttttgtatttttattagagacggggtttcaccgtgttagccaggatggtctcaatctcctgacctcgtgatccacccgcctcggcctcccaaagtgctgggattacaggcgtgagccactgcgcctggcctgtgatcagtttttaaaaaatcttttactatgtgtaatccaccctacctagaatttaaataaagcctgcagtagtaagcagtcgactatattgatttcacaacccctaagtggttcagaattgcaattagaaaatttttccttttggccaggtgtggtggctggagcctgtaatcccagcactttgggaggatcacttgaggtcgggagtttgagaccagcctgaccaagatggaggaaccccgtctctactaaaaaaaaaaaaaaaaaaaaattagctgggcgtggtggtgcatgcctgtaatcacacctacttgggaggctgaggcaggagaattgcttgaaccccaggggctggaggttgtggtgagctgagattgcaccattgcactccagcctgggaaacaagagtgaaactgtctaaaaaaaaaaaagaaaataaataaatttttacttttgctctgcctttttatcaagcaaaatcccaaaagaacatttactataaacatctttctgtgaatccttatttctgtcccagccaccatgacccaataatctctagagcctgttagtgttctccagattgaagccttccctctaactgctcctaaactctgtgatgtagtggaaaagttttgaggcctcgattctcatcccaggtttttcacctacagatcatacggccttagcctcttgacaccattgtctccttatggccaaagatggaactgtacttgggtggtatctgagcaccctgttggctttgacattctagggctcttcccttggcaccactctcttatttaaaaggaacaggatgtggacttaggagggttatttctctgcaaactatcctctctttcttatgacaagctatttctgaatgtgcacatttgaggctaagcaaattccttcctgggaggttgaaagacccttatttctctccagaggagtattatggagagtcaattgatgctgaggaggtggtagagacctagtgaactcatctgcagtggctttgagcaaggcttttagaatcataaggtgggtggggtcctgtgt

SEQ ID NO: 275 - DNA, 485 bp, Homo sapiens
aaagaaagaaagaaaaagacaaagaaagaaagtaagaaagaaagaaaattttttttcacttttgctcggcctttttatcaaggaaaatcccaaaagaacatttactgtaaaagaacattgactataaacatctttctgtgaatccttatttctgtcccagccaccatgacccaataatctctaaaacctgttagtgttctccagattgaagccttccctctaactgctcctaaatctgtgatgtagtggaaaaggtttgaggccttgattctcagcccaggtttttcacctacagatcatatggccttagcctcttgacaccattgtctccttatggccaaagatggaactgtacttgggtggtatctgagcaccctgttggctttgacattctagggctcttcccttggcaccactctcttatttaaaaggaataggatgtggacttagaagggttatttctctgcaaactatcctctctttct

SEQ ID NO: 276 - DNA, 579 bp, Homo sapiens; identical to SEQ ID NO: 273

SEQ ID NO: 277 - DNA, 246 bp, Homo sapiens; identical to SEQ ID NO: 272

SEQ ID NO: 278 - DNA, 478 bp, Homo sapiens
aaaaagcagaaactgctgattgttcctttttttgttgactgattatacaatgtgtccttttaaaaatggttctctgttctctttgcagttcttgtattggttcctagttcctactaatttctcacacttagttaactagtcagtcttactgaaaagtaaactaaccagggatccctggtttctgtatctttcaaacctatagggttacaaaccaaagtgagatgcctatctggtttctgcacagttgtcctgaattatgttggcagatattttatacctagaaattcaccttgaaaaataaattgaaaccataccaagtatttagagctaggggtctaaagtctgcaaaagccctgggaggttgcgttgtctcaagagccagtattcaatggaccactccacatcatagtaaataaaatttgaacacagcattttgaagccaatagtatgggtctctgtgtgtcctgtgtgccctgag

SEQ ID NO: 279 - DNA, 835 bp, Homo sapiens
gagaaacacaatactgtttctgcatcataacaaagatctagttgtgcaaactgcacagccagaccaacccaattatggttttcctctggatctcttatactgtgaaagccttcttggtctggaccctggaactttcagcagagttttaaacaaaaactacacgctgcttgtttccatggctcccctcaccaatgaaatccggcccatcagcagctgcacccctcagcatattggaccagctatcccagaaatcagctctgtctggtttaaacggtacatttatcatatcactggacaaggaccaccatcccttttattgtccaaaggtacaagacctcaaaaactgccagatatatttcagagttatgatcgattgctaataacatcttggggtcatgatcctggagtagttcctacctcaaatgtgctcacgatgttgaatgatgctttaacacattctgcagttttaattcaggagcatggtctgcatgggataggagaaactgtccatgtcccatttccatttgatgaaacagaactacaaggagagttcactcgtgtcaatatgggtgttcataaagcattgcagatactaaggaacagtggacttacaacatctctgcggatatgtcaccatgttgaatgtttccatccaacttgcaaatagaaaactcagtgatgcttctgatgagagaggaaaacctgatttggcttctggctcagatgtaaatgggagtacagagtcatttgaaatggtcattgaggaagcaactacagattcagcaacaaagcaaacctctggtgccacaacagaagcagattgggttcctctcga

SEQ ID NO: 280 - DNA, 379 bp, Homo sapiens; identical to SEQ ID NO: 270

SEQ ID NO: 281 - DNA, 579 bp, Homo sapiens
aaaaagcagaaactgctgattgttcttttttttgttgactgattatacaatgtgtccttttaaaaatggttctctgttctctttgcagttgttgtattggttcctagttcctagtaatttctcacacttagttaaccagtcagtcttaccaaaaagtaaactaaccagggatccctggtttctgtatctttaaaacctatagggttacaaaccaaagtgagatgcctatctggtttctgcacagttgtcctgaattatgttggcagatattttatagccagaaattaaccttgaaaaataaattgaaaccataccaagtatttagagctaggggtctaaaatctgcaaaagccctgggaggttgtgttgtctcaagagccagtattcagtggaccactccacatcatattaaataaaatttaaacacagcattttgaagccgacagtatgggtcactgtgtgtcctgtgtgccctgagcgtattgtagagtagttgttgagtctgctgccttatctgtgtgttatgaggtcaatgcactgatcacttgcttttttcacttctatactaactctaggcac

SEQ ID NO: 282 - DNA, 2276 bp, Homo sapiens
ttttttttttttaccctctcatgcctatgtttgcttttgcttccacagacccttctgagtaaggactatcctcagactactggaggcacttagtcacaagcttgcctgaggctcagagctggcaatacctgggagtttatgtcaatcccacagcacccagcaaccctgcctgcaaaatatttacccatgattgacaggtgcaggtgtatgaaagcccagctccttgacttgaggggcacctttgtggtgaattaggtttggcaaaagggaatccagaggccaactttgtaaaaatgcagatagataaatagaaagaaatctttgccttggaagtccagttgagaaagagagtgatttacttgagactctgaaaacagagactaaaatctgtactttttcatgggaaagaagcctatggtgaaagagaaacaaagagaaaggtaggaaatagggtgggtctactccgtagctttaaaccactctgtcatattataaagcccggtgaggttttaactaacacaagtgcctggactctacacatagagattctgatttaaacgcttccaggtgggtggaagccactagtagtcttaaaacactcccaagtaattttaccatgtggctagagatgaaaaggacaatctatctactagaatctcaagtaaccattattgaagtgccccaaatgtgcagctacctcatagaaaaggcttaacaccaccctttgatggaatttcccttcctctctccatggtcttgtctgcatagcatggaaaatagagaagagataaagaggtagatggagaggttgaacctgtaatttgcctatgtagagcagtttctcaaacttttctgaccacaagatgcagtgagaaatatacaattctttgtgatcagttttttttttttttttttttttttttttgagatggagtcttgctccgttgcccaggctggagtgcattggaatgatctcggctcactacaagccccaccctcctgggttcacaccattctcctgccttagcgtcctgagtaggtgggactacaggcacccaccaccatgcccagctaattttttttttttttgtatttttattagagacggggtttcaccgtgttagccaggatggtctcaatctcctgacctcgtgatccacccgcctcggcctcccaaagtgctgggattacaggcgtgagccactgcgcctggcctgtgatcagtttttaaaaaatcttttactatgtgtaatccaccctacctagaatttaaataaagcctgcagtagtaagcagtcgactatattgatttcacaacccctaagtggttcagaattgcaattagaaaatttttccttttggccaggtgtggtggctggagcctgtaatcccagcactttgggaggatcacttgaggtcgggagtttgagaccagcctgaccaagatggaggaaccccgtctctactaaaaaaaaaaaaaaaaaaaaattagctgggcgtggtggtgcatgcctgtaatcacacctacttgggaggctgaggcaggagaattgcttgaaccccaggggctggaggttgtggtgagctgagattgcaccattgcactccagcctgggaaacaagagtgaaactgtctaaaaaaaaaaaagaaaataaataaatttttacttttgctctgcctttttatcaagcaaaatcccaaaagaacatttactataaacatctttctgtgaatccttatttctgtcccagccaccatgacccaataatctctagagcctgttagtgttctccagattgaagccttccctctaactgctcctaaactctgtgatgtagtggaaaagttttgaggcctcgattctcatcccaggtttttcacctacagatcatacggccttagcctcttgacaccattgtctccttatggccaaagatggaactgtacttgggtggtatctgagcaccctgttggctttgacattctagggctcttcccttggcaccactctcttatttaaaaggaacaggatgtggacttaggagggttatttctctgcaaactatcctctctttcttatgacaagctatttctgaatgtgcacatttgaggctaagcaaattccttcctgggaggttgaaagacccttatttctctccagaggagtattatggagagtcaattgatgctgaggaggtggtagagacctagtgaactcatctgcagtggctttgagcaaggcttttagaatcataaggtgggtggggtcctgtgt

SEQ ID NO: 283 - DNA, 266 bp, Homo sapiens
aaagggatgaagtgacagcatatcctgatgtgtgtgatggtttcatgagttattatctatttcaaaatttattgcaatgtgtggaaaagaacaaggacttgtactatctgactttaaggtttactataagctatcagacacaaggcatcaagagtgacaaacggataaacagcctgagttagaaaacctgaaattgatccacagctatacggtcaataaatgggttttcagtaaaagcagttcaataaaagaaaataaatcatttc

SEQ ID NO: 284 - DNA, 376 bp, Homo sapiens
gatggtgtcaagagcctggacaccacggctggggtcgagatcccaccagtgtccagggacctcccccagcccaccagtatcagattctattccattgctcaaatcacaaaacatcgagtggagagttctccttggagatcataaagtaaagattctgtggcatggtggccagttaggccactggaagcatggcaaaatattgaaaatgagggattaggtgacagtgtagtaactgctgaatactaaatacttgatccaggccccattccctggagattgacagggagacacattgtccaggtagtagtggagaaatgttttctgggtatctgaccagcctttgtggaaagaactggcaccatcctgcagatgtaac

SEQ ID NO: 285 - DNA, 266 bp, Homo sapiens
aaagggatgaagtgacagcatatcctgatgtgtgtgatggtttcatgagttattatctatttcaaaatttattgcaatgtgtggaaaagaacaaggacttgtactatctgactttaaggtttactataagctattagacacaaggcatcaagagtgacaaacggataaacagcctgagttagaaaacctgaaattgatccacagctatacggtcaataaatgggttttcagtaaaagcagttcaataaaagaaaataaatcatttc

SEQ ID NO: 286 - DNA, 376 bp, Homo sapiens; identical to SEQ ID NO: 284

SEQ ID NO: 287 - DNA, 2275 bp, Homo sapiens
ttttttttttttaccctctcatgcctatgtttgcttttgcttccacagacccttctgagtaaggactatcctcagactactggaggcacttagtcacaagcttgcctgaggctcagagctggcaatacctgggagtttatgtcaatcccacagcacccagcaaccctgcctgcaaaatatttacccatgattgacaggtgcaggtgtatgaaagcccagctccttgacttgaggggcacctttgtggtgaattaggtttggcaaaagggaatccagaggccaactttgtaaaaatgcagatagataaatagaaagaaatctttgccttggaagtccagttgagaaagagagtgatttacttgagactctgaaaacagagactaaaatctgtactttttcatgggaaagaagcctatggtgaaagagaaacaaagagaaaggtaggaaatagggtgggtctactccgtagctttaaaccactctgtcatattataaagcccggtgaggttttaactaacacaagtgtctggactctacacatagagattctgatttaaacgcttccaggtgggtggaagccactagtagtcttaaaacactcccaagtaattttaccatgtggctagagatgaaaaggacaatctatctactagaatctcaagtaaccattattgaagtgccccaaatgtgcagctacctcatagaaaaggcttaacaccaccctttgatggaatttcccttcctctctccatggtcttgtctgcatagcatggaaaatagagaagagataaagaggtagatggagaggttgaacctgtaatttgcctatgtagagcagtttctcaaacttttctgaccacaagatgcagtgagaaatatacaattctttgtgatcagttttttttttttttttttttttttttgagatggagtcttgctccgttgcccaggctggagtgcattggaatgatctcggctcactacaagccccaccctcctgggttcacaccattctcctgccttagcgtcctgagtaggtgggactacaggcacccaccaccatgcccagctaatttttttttttttttgtatttttattagagacggggtttcaccgtgttagccaggatggtctcaatctcctgacctcgtgatccacccgcctcggcctcccaaagtgctgggattacaggcgtgagccactgcgcctggcctgtgatcagtttttaaaaaatcttttactatgtgtaatccaccctacctagaatttaaataaagcctgcagtagtaagcagtcgactatattgatttcacaacccctaagtggttcagaattgcaattagaaaatttttccttttggccaggtgtggtggctggagcctgtaatcccagcactttgggaggatcacttgaggtcgggagtttgagaccagcctgaccaagatggaggaaccccgtctctactaaaaaaaaaaaaaaaaaaaaattagctgggcgtggtggtgcatgcctgtaatcacacctacttgggaggctgaggcaggagaattgcttgaaccccaggggctggaggttgtggtgagctgagattgcaccattgcactccagcctgggaaacaagagtgaaactgtctaaaaaaaaaaaagaaaataaataaatttttacttttgctctgcctttttatcaagcaaaatcccaaaagaacatttactataaacatctttctgtgaatccttatttctgtcccagccaccatgacccaataatctctagagcctgttagtgttctccagattgaagccttccctctaactgctcctaaactctgtgatgtagtggaaaagttttgaggcctcgattctcatcccaggtttttcacctacagatcatacggccttagcctcttgacaccattgtctccttatggccaaagatggaactgtacttgggtggtatctgagcaccctgttggctttgacattctagggctcttcccttggcaccactctcttatttaaaaggaacaggatgtggacttaggagggttatttctctgcaaactatcctctctttcttatgacaagctatttctgaatgtgcacatttgaggctaagcaaattccttcctgggaggttgaaagacccttatttctctccagaggagtattatggagagtcaattgatgctgaggaggtggtagagacctagtgaactcatctgcagtggctttgagcaaggcttttagaatcataaggtgggtggggtcctgtgt

SEQ ID NO: 288 - DNA, 716 bp, Homo sapiens
agaagagatgattggacactctcaagcgtggtgctggactttgtcatctcttgcacagccatctccacaccttagtgcttacctcatgttagttttttatattctgcaaagacgaaaccaaaataatccaaatttgacacaaatacctgggctacatcttatttgagatgtttaacaaatgtctggatcatcttttcttatatattacgcaggaaacactgtgaagtaagcaaagttggaatgcccaagtgaaagaccatttgaatatttacaagtagatttcagacaggaatactacagggtggtcacaggataacaaattctaggcagcagatttacatgacttgaggctgtgggctgttaagacgctgaaaaaccagggtgtggaccaagctggctaaggctgagtggacccaacgtggtgctggattggatggaggttttacctaggccctcattatatgctcattaacatactaaatcacacacccgccagtgccatgacagttctgagaccagtgtttgatgtaaaaatggcaccacagttccaagaaatctccacctttacccaggaattttcgtgaatattccaattcttggttaaagaaacccatcaagatgaaaccccagaacccattattctctcttgggtatgcccaagctcccctttcttgagtgtgtactttttgctttgcaataaatctcttctttcacta

SEQ ID NO: 289 - DNA, 2275 bp, Homo sapiens; identical to SEQ ID NO: 287

SEQ ID NO: 290 - DNA, 574 bp, Homo sapiens
cgagaggctgaggcacaagaattgcttgaatccaggaggccggaggttgcagtgagctgagattgtgccacggcattccagcctgggtgacagcaagaccctgtctccaaaaacaaaacaaaaccaaaaaactcacagctttgaagtaagacgtaacgggatgaacgggatgttttctaaacttggtgaaacgtataaatctacaaattcataaagctccagaaagcccaaccaggatgtgtgtccagaaatccctgtctaggcttgtcattgtcaaactgctgaaaagcagcagtaaagagaatctttaaggcagccagagaaaaaaggatccatgacatacaaggggacactcatgggaatcaccacagccgccctgtcagaaaccatggggttcaggacacagtggatcacatcttcgaagatctgggctgggaggaattaacccagaattctgtgtgcagcagaaatattcttcaagagtgtaagtgtaataaggagagttcagacagaatccaagagcatttgtcgtcagcagagcccctcctattagaaatgctaaaaaaaaaaaaaa

SEQ ID NO: 291 - DNA, 198 bp, Homo sapiens
agagctgagggcaaaggggaggaggctggcgggtggaggtgcccagggaggcctggggccgggtcccaccaggctctggaggggcctgtgggacaagggtggagaagcagcctccacaggaggactgggagccgagggcctggcccgggcctagcggttccccccagtgccctgtgccttcttgtctcccggggtgag

SEQ ID NO: 292 - DNA, 6427 bp, Homo sapiens
agctcaccagaacaagctagaagaaatgatcaatgagctagcagtggcgatgacagctgtaaagcacgaacaggaatacatggaagtccgggagagaatacacagagccagtaagtgaatgccgtcactttgcagcagtgtctgatggtgaaggttgttttactcaacagcttgctcgtattttcctcatttggaaactttgcaaattttatgtgaaagcattgactttaaaagtgtacctacacgagatattttttgagcatacacatgtgtggagctttgtagtttattattgggacattcattgtaaactagaaaatgctattaagatttagtacaagtttttaagagtttagttttctggccgggcatggtggctcacgcctgtaatcccagcactttgggaggctgaggcaggcggatcacctgaggttgggagttcgagaccagcctggccaacatggtgaaacctcgtctctacaaaaaataaaaaaattagctgggtgtggtggcgtgcacctatagtcccagctactcgggaggctgaggcatgagaatcacttgaaccgggaggcagaggttgcagtgagctgagattgggccactgcactccagcctgggcaatggagctagactctgtctcagggaaaaaaaaaaaaaaaagtttgggtttttaaaaatgtatggtgagctaaggaataagctaattgttttcttaaatcagaagggaaaaatgttgtaaaatgcgtattgcattggtttttaatcacatacctgaaacttatgtaccagtgggattaatattagatgctgagatttaacctttttactaaaatggaaagcttaatatagttagactagaaaacaccaaaacatgagtacagggaagtcaccaggtgaagatcagtttgggtcctcaagtttgtaagttgggaatttggaatgtattttgctgtggaaacagtgatgattgaaatcttgtgttaggttgcaaaagtctgtttagaactggatagagcattaaaaatgaagcttttgcatttaaaattaagaggtactatattgacagacagaccaattccattgattaggttcagggccacaccattgttcagtgttttcatcctccaggtagttcttggggagatgaaaagagcaaggtggctgggggcagtggctcacgcctgtaatcctagcactttgggaggctgaggtgggcggatcacaaggtcaagagactgagaccatcctggccaacatggtgaaatcccacctctactaaaactacaaaaattagccgggcatggtggcacgcgcctgtagtcccagctactcaggaggctgaggcaggagaatcacttgaaccccggaggcggaggttgcagtgagctgatatcatgccattgcactccggcctggcgacagagcgagactctgtctgaaaaaaaaaaaggaaaaagagcaaggtatagtgacgcatctctgtagtcccagctactcaggaggctgaggcgggggattgcttgggagcaagctcttgtcttaagggcagtgattttatgtcaggaatctttgttctgagactggagtaggaagtgaagagtgactcaaagagataagcacagcttgaatttcttccagatgtgctttctgtttttcctacccttaaatctgttcttgctacttatggaaacaaatcttcaggatctagagcacagacatcagcttgtgttggcaggaaggtgtgtaaatgtaatagcctggagaactcccctcatccccacttgttttaggagtggagtggggcatattatggaccaaggcttgtctacaattactccagcctcttgcctcacaattttgtctccttgcctccactcttaatctcaccagctgggatcttcactttttctctcttatcttgttgggactcatatgttgtttaccttgttcccagatggggaaacagcccattctggagttggaagggcactgaactaactcagagggcaagttcctctactttgcaattttaactggttcagaccagatggctttcaagttatagaagttcttgggaacacagtggccagaggaagcacatgtcttccgtctttagggtgtccaaccttgttctctcacccatgatttgagtggagatactcctgtatttgtttcacaaatagtgagctatgtgttcatatttaaaagtgttagcaatttctagaattgagtttataggcattcagtttaaatttacaaagcaaatggttcccataatgttttgtttttgtgagtcttcctataggacccactcctcagcagtgaacataatgagatcctttcactacagtgttgtaataataatgtgttgcttctagatcaggctgatatatgagtggcatgaggacagtgtcccaggtcactacattctgatgttactgtgcttcaatgtgttctatttaaacttaaaggtgcatttttctttgggaggccgaggcaggtggatcacctgaggtcaggagtttgagaccagcctggccaacatggtgaaaccccgtctctactaaaaatgcaaaaattaggccgagcacagtggctcatgcctgtaagctcagctacttgggaggctgaggcaggagaatcgcttgaacccaggaggtggaggttgcagtgagctgagatcgcgtcattgcactccagcctgggcaacaagagtgaaactctgtctcaaaacataaaaaataaaataataataataataaaatacatttaaaaataaaaagaatttggccaggcgtggtggctcatgcctataatcccagcactttgggaggccgaggcaggcagatcacctgaggttaagagttcaagaccagcctgaccaacatggtgaagccctatctctactaaaaatacaaaaattagccaggcatgggggtgtgcacgtgtaatcccagctactcaggagtctgagacaggagaatcacttgaacccaggaggcagaggttgcagtgagctgagattgcgccactgccctccagcctgggtgacagtgagactctgactcaaaaaaaagtaagtaaataaaaagaatttgatcagaaacttgaatgtaacaaatagagtatagtaaatatagagtaggtgtggattttactttaaggatcaaatccttagtttgagagcaggacagatgagcatagtttgtcttgtatttgatggtctggtagtaactgtcagtatggatccatataactgagtaacctcttccattgagaacaattgacaagtacacaggtgctcaacaaatatttgtaacatatttggggaaaaagacactcagactgccatattttgatgttgtaaataattgcattttggataactgtgattttgaaataattccttaatttttttagaagtcagttttctgattcagcaaattggatactaatacaggacgtttcaatggtgagggagaaagatggttgtattgggttttaaccctagaattatgaccttgggcaagtcacattttcttctctgctccccatatacaagcagaatggacttggctgtacccagtgaatctttaaggtttcttttaaaaatctttgcttctactttgggaggctgaggcaggaggatcagttgaggccaggagttcaagaccaacttgggcaacatagcaagaccctttctctacaaaaacagaaaaaattagtcaaatgggctggtgcatacctgtactcccagctactcaggaggctgaggtggcaggattgcttgagtacagttcaaggttgcagtgaactatgattgtgtcatggcattccagcctgggcaacagagcaaacaaaaaagtctttgctttggagtatgttgagttgcttggagacaaaagtatttagagtataggtgacccataggttacaatgacttcacttagaaattttcagctttatgatggtgcaaaagtgatgtgcattcagaagaaactgagcatcaagtacccatgcaaccattctgttttttactttcagtgcagtgttcactaacttgataaataaaatagaaaataataataaaatgcagtttaacgtgtatgagatacacaacactttattataaaataatctttgtgttgttagatgcttttgctcaactgtaggctaatgtaagtgttctgatcgtgttttacgtaggctaggctaagctatgatgtttgctaggttaggtgtattaaatatatttttgacttatgtattttcaacataagctgggtttattgggatgtaaccccatcgtaagttgaggaacatctattctatgagtggtgtacacaatattactttcacacagagtgaagactaaaatatttatgatgcctatgtctttttgggggagaattgttaaattttgtttgtttgttttgtcctcaacagtcaacgacaacacaaacagcagagtggtcctttggtccttctttgaagctcttgttctagttgccatgacattgggacagatctactacctgaagagattttttgaagtccggagagttgtttaaaaagcctcttcctgatgatcccaactcagaattcactgtttaccaaacaccttggtcataataatgtcattagtttctccatttttattttctgaactgtacattcacaacttatgtttctttgagattaatagatattgggggaaaaacgcctttttaggaaaattatagtgaaaatttgacagttgattggcataatttcttgtttgaatgctgcctccattatataggtccttccaggaactcaaacactgtaagtgaaatatgggagtatagtttttattatttcttcttttccttttgttttcataatataatgcagtttgttcaggaaatcagcacaaagcctgatagtactttactaaaatgactgcattctttggattccttcagtctatggttcaagtcactaaagattcatttttgttgagtccttatgagaaacagcagtatgaatcttgacggtttctgcccgtcctaatggcagagctctctgacttgggtgtatgctgccaggctgggtactttcatactttgttttcttgttttgctttaaaactacgactcagcatacattttcccacatacatttttacattgtaccttaggactcagtcatctccacttaaattgatgacacaagcagctaataaccatttctgggtttctgcctaaccccctaattgtctgttaaagccaattctctgggtgtcccagtgagtggtggctttttttctttccacattggcacattcacttctcccactcttggcatgtaagaaataagcatttacataattggaaaaatctggatttctgatgccaaagggttaaagcttcttggatttcatttcattgatatacagccactattttatttttgatcagtggcctttgggccactgttcagggtactgaccatcagtgtcagcattagggttttggtttttgtttcttttgggtctttcttttttggcacatgtgaatcttgttttgtgtaaaatgaaattactttctcttgttctctgatgatgggtttaaaattaaaagagcatccggttttggtatggggatgatccaggattatgttgtgactgatacatattagttacttgtgcttttttttttttttttggatctttgcaagggcaaaactacaagtaacgagttttatataattaatttaaatttgttacaggttttcatgttcaggataaaccatacttccaccttgggtgagaacacttgcaacagtttattaatgaggtgactttcaccttaggacaactgttgcatgccaagttttttgtgtgtgtgaaacacttcaaaactgatttaaaagatgtaaatttaaaattggttgtatctaatatgccccaggttcggtaaataaacaattctttttaaaaacagtattctgtgttttatatattgacagctaatccacattttttacacaccaactttctgttcttatttgacatgagacatgttcatgttttctgagtatttatacctattacgtctgttactttttaattctataaacttgaggatagtgaatggtaccaagttttagtttctgcgtaggttttccagtgtggcttctctgatggatcagtgctaaaatcttaagtatttttctatttgggaaaaaagggttgaattattttcacttgcccacgtagtttatgaatgtgggaaatagcttcaaagacagattaaatgatttgcccaaggccacagaaaagagtgaaaggtggaaccggagactagatcaccacctgtagaaactgttcttcctctgtgaaactaacggcctgctggtaataaaagtagctaccatttcttga

SEQ ID NO: 293 - DNA, 2230 bp, Homo sapiens
gttttacgtaggctaggctaagctatgatgtttgctaggttaggtgtattaaatatatttttgacttatgtattttcaacataagctgggtttattgggatgtaaccccatcgtaagttgaggaacatctattctatgagtggtgtacacaatattactttcacacagagtgaagactaaaatatttatgatgcctatgtctttttgggggagaattgttaaattttgtttgtttgttttgtcctcaacagtcaacgacaacacaaacagcagagtggtcctttggtccttctttgaagctcttgttctagttgccatgacattgggacagatctactacctgaagagattttttgaagtccggagagttgtttaaaaagcctcttcctgatgatcccaactcagaattcactgtttaccaaacaccttggtcataataatgtcattagtttctccatttttattttctgaactgtacattcacaacttatgtttctttgagattaatagatattgggggaaaaacgcctttttaggaaaattatagtgaaaatttgacagttgattggcataatttcttgtttgaatgctgcctccattatataggtccttccaggaactcaaacactgtaagtgaaatatgggagtatagtttttattatttcttcttttccttttgttttcataatataatgcagtttgttcaggaaatcagcacaaagcctgatagtactttactaaaatgactgcattctttggattccttcagtctatggttcaagtcactaaagattcatttttgttgagtccttatgagaaacagcagtatgaatcttgacggtttctgcccgtcctaatggcagagctctctgacttgggtgtatgctgccaggctgggtactttcatactttgttttcttgttttgctttaaaactacgactcagcatacattttcccacatacatttttacattgtaccttaggactcagtcatctccacttaaattgatgacacaagcagctaataaccatttctgggtttctgcctaaccccctaattgtctgttaaagccaattctctgggtgtcccagtgagtggtggctttttttctttccacattggcacattcacttctcccactcttggcatgtaagaaataagcatttacataattggaaaaatctggatttctgatgccaaagggttaaagcttcttggatttcatttcattgatatacagccactattttatttttgatcagtggcctttgggccactgttcagggtactgaccatcagtgtcagcattagggttttggtttttgtttcttttgggtatttcttttttggcacatgtgaatcttgttttgtgtaaaatgaaattactttctcttgttctctgatgatgggtttaaaattaaaagagcatccggttttggtatggggatgatccaggattatgttgtgactgatacatattagttacttgtgctttttttttttttttttggatctttgcaagggcaaaactacaagtaacgagttttatataattaatttaaatttgttacaggttttcatgttcaggataaaccatacttccaccttgggtgagaacacttgcaacagtttattaatgaggtgactttcaccttaggacaactgttgcatgccaagttttttgtgtgtgtgaaacacttcaaaactgatttaaaagatgtaaatttaaaattggttgtatctaatatgccccaggttcggtaaataaacaattctttttaaaaacagtattctgtgttttatatattgacagctaatccacattttttacacaccaactttctgttcttatttgacatgagacatgttcatgttttctgagtatttatacctattacgtctgttactttttaattctataaacttgaggatagtgaatggtaccaagttttagtttctgcataggttttccagtgtggcttctctgatggatcagtgctaaaatcttaagtatttttctatttgggaaaaaagggttgaattattttcacttgcccacgtagtttatgaatgtgggaaatagcttcaaagacagattaaatgatttgcccaaggccacagaaaagagtgaaaggtggaaccggagactagatcaccacctgtagaaactgttcttcctctgtgaaactaacggcctgctggtaataaaagtagctaccatttcttga

SEQ ID NO: 294 - DNA, 247 bp, Homo sapiens
aggtcagatacattttttttttttttggagacagtctctctctgtcacccagggtggagtgcggtggcgcgatcttggctcactgcagcctccgcctcccgggttcaagcaattctcctgcctcagcctcccaagtagctgggaatacaggcgcacgctgccacatctggctaatttttttttgtatttttagtagagacgggatttcaccgtctggtctcgaactcctgagctcaggcaatctgcc

SEQ ID NO: 295 - DNA, 118 bp, Homo sapiens
cagctacttgggaggctgaggcaggagaatcgcttgaacccaggaggtggaggttgcagtgagctgagatcgcgtcattgcactccagcctgggcaacaagagtgaaactctgtctca

SEQ ID NO: 296 - DNA, 105 bp, Homo sapiens
gtgtgcctgtaatcccagctactctggaggctgaggcaggagaatcgcttcagcctgggaggcagaggttgcagtgagctgagattgagcaccactgcactccag

SEQ ID NO: 297 - DNA, 246 bp, Homo sapiens
aggtcagatacattttttttttttttggagacagtctctctctgtcacccagggtggagtgcggtggcgcgatcttggctcactgcagcctccgcctcccgggttcaagcaattctcctgcctcagcctcccaagtagctgggaatacaggcgcacgctgccacatctggctaattttttttgtatttttagtagagacgggatttcaccgtctggtctcgaactcctgagctcaggcaatctgcc

SEQ ID NO: 298 - DNA, 3008 bp, Homo sapiens
ccaagtgcggggctgtgctctgccccccagccccctgccagcaccccacccagccccctggtgagtgcctgggctgatcctggctttcttcccctgcattacccagctcaccctgaccagcctgccccacccaggtgcctgctgccccagctgtgacagctgcacctaccacagccaagtgtatgccaatgggcagaacttcacggatgcagacagcccttgccatgcctgccactgtcaggtaactgcccagccttgctgctgccctgctgagcccctcctgggcatgccccgattgctctctcccctgctctctcgcaggatggaactgtgacatgctccttggttgactgccctcccacgacctgtgccaggccccagagtggaccaggccagtgttgccccaggtgcccaggtatgtgggcactcactgggcctgaggggatcagggccccagaggctgctgtcccacagccccatgggcccaacaggtaccttagaaagcaatggccttctgaattgtttcagtcttgtttcagagcttagaactctctggaactcacggggtgtgggtgggagggagagtagagagatttgtttattcctgcctgtacctacaccaccctctcctcccatgctccatttcctcttctagtaactactgccccccgccccaccacgctagggcccccacccccctaccccccaggtaaacccatgtatctacctggataacacaggttcatgagcaggcacttgagcctgccacgtaggaggccgggtgctgggatgcatgggacacgtccctgcccgcatagagagtctgtgtgagggcgtgtgtcaaacacaggtacacacatgtgtaagcactccccttcttcccctcagagacacacatctgcctgcaggtgaatgacccccaatgcgcacgcacactcgtgtgtgctcacaacgatacacatgcctgcacacatgtgcacatggccacttcctcctctttcccctcgagtcagcttccaagtgggcacttgtgtggcggctctggactccagggctggagggactgtcaggctttgccctcatacctgcccccaccatccactgcccagactgcatcctggaggaagaggtgtttgtggacggcgagagcttctcccacccccgagacccctgccaggagtgccgatgccaggaaggccatgcccactgccagcctcgcccctgccccagggccccctgtgcccacccgctgcctgggacctgctgcccgaacgactgcagcggtgaggtgggcgggtcagggcggccttctgggatgggatggcatggcccccggaaggcagcacgccctggggcagtcgccctctcccaggctatagcccctccctcccccaggctgtgcctttggcgggaaagagtaccccagcggagcggacttcccccacccctctgacccctgccgtctgtgtcgctgtctggtgagtctgcacctgggtgggaggcgcccaggggagtggaggcgggacttgcataggccaggagaggcccgcccaggtgggaggggtgggacctgatggcactgggtgggaggggtctcctctgcctcccccaactaacccactgacccgtggtgcgtttgtcggtccgtagagcggccaacgtgcagtgcctggcccgccgctgcgtgccgctgccctgtccagagcctgtcctgctgccgggagagtgctgcccgcagtgcccaggtaggggccgcacccctcggctgctcctccctgggggtcccctcggaggcctgttcctgggcccctttgatgcgctgtctcgccgcagccgccccagcccccgccggctgcccacggcccggcgcggcccacgcccgccaccaggagtacttctccccgcccggcgatccctgccgccgctgcctctgcctcgacggctccgtgtcctgccagcggctgccctgcccgcccgcgccctgcgcgcacccgcgccaggggccttgctgcccctcctgcgacggtaacgccctggcggtgcccctcccggccacccgcgtcctgccgccccgccccgccccggagcgccctgcccagtccccttcctccaggcccgctccgcccacgtcggggatcttgttaggaatgtagtgtccggtcagcatggcctgggagccagccggcacggccctccatcccccacggcccccagccccccacgacacccatcctccacggacctcagcctccacggagcccacggcctccccgccctcacggacccccagcccccacgacctccagcccccacggcccccacgacacccgtcctccacgcccctcaaccccacgaccaccaagtccccacagccctctagtccccacggccccccagcccctgcccttctccccaggctgcctgtaccaggggaaggagtttgccagcggggagcgcttcccatcgcccactgctgcctgccacctctgcctttgctgggagggcagcgtgagctgcgagcccaaggcatgtgcccctgcactgtgccccttccctgccaggggcgactgctgccctgactgtgatggtgagggtcatgggatagggagctgccggggtgggatgcgggagaccagagggctgggtcagaataatctttactgccctagggtggatctaaaatatttattacagtaagaaaaagccccgaggctgggagccctagctgaagcctgtgaccccgacaatttgggaggctgaggcaggaggatcacttgagcccaggagttcaagaccagcctgggcaacatagagagatcttgtctctacacaaaaaatttaaaatcagctggtcgtggtgcctcttgtagttccatctactccggaggctgaggtgggaggattgcccaggagtttgaggctacagtgaaccgtgttttcaccactgcactccaggctgggtgacagagtgagaccttgtctcaaaaaaaaaaaaaaaaaaaaaaaaa

SEQ ID NO: 299 - DNA, 303 bp, Homo sapiens
ctgttgctatttgccgtgtggtcttgggcaagttacatagcctctctgggcctaaatttggctcttgtaaaaagacccagtcccccagtccccctgtcttccctcactcttgtgcgatcttggccattttggccacttgcccttaccaactgtaattttatttactatttgccttccaattaactcacttattaatttaatttgatttagaaaggagttttatatcacactgtaagtggaaaattagacttgccaggaccacattaccataaaaatgaatataattaaaattataatgttgtt

SEQ ID NO: 300 - DNA, 2851 bp, Homo sapiens
tccagttggaaaaaagctgaccattcattctgagaaaagcgatggtgagtatgaacacaatttgaaaagaaggatgttccatattaagctacattgaattctaaacccagttcaggtagtaacactttactctggaattgaaattgtttcctttttttttttttaatttatttttgtttttttgagacagggtcacactctgtcacccaggctggagtgcagtggcacaatcaagagctcattgcaaccttgacttcccgttgacttcccgagctccagtgatcctcccaccgcagcctcctcagtagctaggactacaggcacccgccaccacacctggctaatttttgtatttttttgtagagacagcatttcgccatgttgcccaggctggtctcgaactcctgggctcaagcgatctgcccactttggccccccaaagtgctaggattacaggcatgagccaccaagcctggcctgtttggattttttcaatgagctacataataaccatatgagagctgacctttaaaaacaagtatagtagaacagatgcatccagccatgttttagaaatagcactagtgttttgttttcttgttcaaagcatgtgaattgatttctggtcttggaaagcattcttttgaaaattggttaatgtgagaaatctccccccagatataggctggcttccttttcaagtgccagtaccagagccaggagttaacttttactattaacacgtttacaccagttgcggagagtgtgggaaaccacttctagaaaggtggcagggtatgtgatagaatgcagaaatgaataattccatttggctggaacatcacggggagatgattgactgggcagcacatgctgaattgtatagtgtatactttcattgatttatcccatgtttgaatttgtttatttatttgcttgtttccagctgcttgtcagacattgctgtctcttcctgtggattttaatttagaaaatatattaggtaaatactgtatttgtttaaacttttaataacttgaaccaaaggttttgtttggctggctttttgtaaatggtaacatgggaaatatgtggcagtgcctctttctaaagaagtggggaaactgccctgaaatttctctttttcttgaacatggtttgaactagccttattatcatagtgaactttattactatagacagaaactataaacattttattgatattatactaacaatgtagcacttaaaaactaaggaataatttaagatgtaaaacatcaaatatgcaattaaactttgccctctttttgggaaaaaattcaaacatagtgcatgctggcttcttaaaagttgagtaacagaagtataattgccctttaaaatgactagctttgccttttctcctattattaaatataggtgactattttagagctgatgaatttgcagatcaatctcctggaaacctcagttcttcatccctcagaagaaagctgtttttagatgggaacggaagcatctccgactccttaccttcggcttctcccggaagtcctcacagtggtgttcaaacatcactagagatgttttattcaatagatttgtctcctgtaaagtgtaggagccccttgcagacaccaagttcggtgagaagtatactaaaaagcagttggctaatatgctgtcaagcttgaacccacactttgttgttgttctatcttaggctttcagcagcctgaagccatggttgctttctgtctctagtaaataagtggaaaagagggatgaggaagggcctttactggcctaaccagaaacagaaactaagaactcatgactgtattctctcccttggacacccctgtgagctgcccagattgctttcagaaggagggatggttgtcttttgagtattatgcttcacagaaactaactctagttcgtatgttatcattagtcatagggatgttttaggtcagactcttcaattttgtatttagatatgtacaggatgaccagatttatcatgagtctcaaggaaattcagcataggttatttactaaagtgtgtgagatttacagtataatacaactggcttggcattaataaatttaaaaatttttcacagatggttgcttagtgtgaaacttaatggtttgttcaaatacaatgtgtttatattttgactaacatatttgatactatttcagaatttttgtagcaatcttcttagttgtctttgttgcaaggtgtcttttggtggttctcgtgaactattactagtttataagtgtgttttgaagaccatgataaatagcatgcagcataagagttaaggaagagaaccatatacatttatttactatttaattttattacaggggcagttttcttctagccctattcaggctagtgcaaaaaaatacagcttgggaagcataactagtccttcgcctatttcttcacccactttctcaccaattgaatttcagataggagagactccactctcaggtatgtctcataataaaatacctagttaaaagttttatactatcaatatttgttattagagaggttcttttaatttgtcttaatgatagagctcaaaatgatcactaaccttctaacatttaggaactttgatttttaaataaaagaacagtttaccttcaaaggctggaattctcaccagtttgtactgtagtgttaaatatagttactttaattagcaatatttacatcaaacactatcaaaggaaatttagcaatttccatttgtgctattgtttttgacatcacaatttcactttggtaaacaacacaactgttacagaaatgcagttt

SEQ ID NO: 301 - DNA, 2815 bp, Homo sapiens
tccagttggaaaaaagctgaccattcattctgagaaaagcgatggtgagtatgaacacaatttgaaaagaaggatgttccatattaagctacattgaattctaaacccagttcaggtagtaacactttactctggaattgaaattgtttcctttttttttttttaatttatttttgtttttttgagacagggtcacactctgtcacccaggctggagtgcagtggcacaatcaagagctcattgcaaccttgacttcccgttgacttcccgagctccagtgatcctcccaccgcagcctcctcagtagctaggactacaggcacccgccaccacacctggctaatttttgtatttttttgtagagacagcatttcgccatgttgcccaggctggtctcgaactcctgggctcaagcgatctgcccactttggccccccaaagtgctaggattacaggcatgagccaccaagcctggcctgtttggattttttcaatgagctacataataaccatatgagagctgacctttaaaaacaagtatagtagaacagatgcatccagccatgttttagaaatagcactagtgttttgttttcttgttcaaagcatgtgaattgatttctggtcttggaaagcattcttttgaaaattggttaatgtgagaaatctccccccagatataggctggcttccttttcaagtgccagtaccagagccaggagttaacttttactattaacacgtttacaccagttgcggagagtgtgggaaaccacttctagaaaggtggcagggtatgtgatagaatgcagaaatgaataattccatttggctggaacatcacggggagatgattgactgggcagcacatgctgaattgtatagtgtatactttcattgatttatcccatgtttgaatttgtttatttatttgcttgtttccagctgcttgtcagacattgctgtctcttcctgtggattttaatttagaaaatatattaggtaaatactgtatttgtttaaacttttaataacttgaaccaaaggttttgtttggctggctttttgtaaatggtaacatgggaaatatgtggcagtgcctctttctaaagaagtggggaaactgccctgaaatttctctttttcttgaacatggtttgaactagccttattatcatagtgaactttattactatagacagaaactataaacattttattgatattatactaacaatgtagcacttaaaaactaaggaataatttaagatgtaaaacatcaaatatgcaattaaactttgccctctttttgggaaaaaattcaaacatagtgcatgctggcttcttaaaagttgagtaacagaagtataattgccctttaaaatgactagctttgccttttctcctattattaaatataggtgactattttagagctgatgaatttgcagatcaatctcctggaaacctcagttcttcatccctcagaagaaagctgtttttagatgggaacggaagcatctccgactccttaccttcggcttctcccggaagtcctcacagtggtgttcaaacatcactagagatgttttattcaatagatttgtctcctgtaaagtgtaggagccccttgcagacaccaagttcggtgagaagtatactaaaaagcagttggctaatatgctgtcaagcttgaacccacattttgttgttgttctatcttaggctttcagcagcctgaagccatggttgctttctgtctctagtaaataagtggaaaagagggatgaggaagggcctttactggcctaaccagaaacagaaactaagaactcatgactgtattctctcccttggacacccctgtgagctgcccagattgctttcagaaggagggatggttgtcttttgagtattatgcttcacagaaactaactctagttcgtatgttatcattagtcatagggatgttttaggtcagactcttcaattttgtatttagatatgtacaggatgaccagatttatcatgagtctcaaggaaattcagcataggttatttactaaagtgtgtgagatttacagtataatacaactggcttggcattaataaatttaaaaatttttcacagatggttgcttagtgtgaaacttaatggtttgttcaaatacaatgtgtttatattttgactaacatatttgatactatttcagaatttttgtagcaatcttcttagttgtctttgttgcaaggtgtcttttggtggttctcgtgaactattactagtttataagtgtgttttgaagaccatgataaatagcatgcagcataagagttaaggaagagaaccatatacatttatttactatttaattttattacaggggcagttttcttctagccctattcaggctagtgcaaaaaaatacagcttgggaagcataactagtccttcgcctatttcttcacccactttctcaccaattgaatttcagataggagagactccactctcaggtatgtctcataataaaatacctagttaaaagttttatactatcaatatttgttattagagaggttcttttaatttgtcttaatgatagagctcaaaatgatcactaaccttctaacatttaggaactttgatttttaaataaaagaacagtttaccttcaaaggctgaaattctcaccagtttgtactgtagtgttaaatatagttactttaattagcaatatttacatctaacactatcaaaggaaatttagcaatttccatttgtgctattgtttttgacatctacaatttaac

SEQ ID NO: 302 - DNA, 2851 bp, Homo sapiens
tccagttggaaaaaagctgaccattcattctgagaaaagcgatggtgagtatgaacacaatttgaaaagaaggatgttccatattaagctacattgaattctaaacccagttcaggtagtaacactttactctggaattgaaattgtttcctttttttttttttaatttatttttgtttttttgagacagggtcacactctgtcacccaggctggagtgcagtggcacaatcaagagctcattgcaaccttgacttcccgttgacttcccgagctccagtgatcctcccaccgcagcctcctcagtagctaggactacaggcacccgccaccacacctggctaatttttgtatttttttgtagagacagcatttcgccatgttgcccaggctggtctcgaactcctgggctcaagcgatctgcccactttggccccccaaagtgctaggattacaggcatgagccaccaagcctggcctgtttggattttttcaatgagctacataataaccatatgagagctgacctttaaaaacaagtatagtagaacagatgcatccagccatgttttagaaatagcactagtgttttgttttcttgttcaaagcatgtgaattgatttctggtcttggaaagcattcttttgaaaattggttaatgtgagaaatctccccccagatataggctggcttccttttcaagtgccagtaccagagccaggagttaacttttactattaacacgtttacaccagttgcggagagtgtgggaaaccacttctagaaaggtggcagggtatgtgatagaatgcagaaatgaataattccatttggctggaacatcacggggagatgattgactgggcagcacatgctgaattgtatagtgtatactttcattgatttatcccatgtttgaatttgtttatttatttgcttgtttccagctgcttgtcagacattgctgtctcttcctgtggattttaatttagaaaatatattaggtaaatactgtatttgtttaaacttttaataacttgaaccaaaggttttgtttggctggctttttgtaaatggtaacatgggaaatatgtggcagtgcctctttctaaagaagtggggaaactgccctgaaatttctctttttcttgaacatggtttgaactagccttattatcatagtgaactttattactatagacagaaactataaacattttattgatattatactaacaatgtagcacttaaaaactaaggaataatttaagatgtaaaacatcaaatatgcaattaaactttgccctctttttgggaaaaaattcaaacatagtgcatgctggcttcttaaaagttgagtaacagaagtataattgccctttaaaatgactagctttgccttttctcctattattaaatataggtgactattttagagctgatgaatttgcagatcaatctcctggaaacctcagttcttcatccctcagaagaaagctgtttttagatgggaacggaagcatctccgactccttaccttcggcttctcccggaagtcctcacagtggtgttcaaacatcactagagatgttttattcaatagatttgtctcctgtaaagtgtaggagccccttgcagacaccaagttcggtgagaagtatactaaaaagcagttggctaatatgctgtcaagcttgaacccacattttgttgttgttctatcttaggctttcagcagcctgaagccatggttgctttctgtctctagtaaataagtggaaaagagggatgaggaagggcctttactggcctaaccagaaacagaaactaagaactcatgactgtattctctcccttggacacccctgtgagctgcccagattgctttcagaaggagggatggttgtcttttgagtattatgcttcacagaaactaactctagttcgtatgttatcattagtcatagggatgttttaggtcagactcttcaattttgtatttagatatgtacaggatgaccagatttatcatgagtctcaaggaaattcagcataggttatttactaaagtgtgtgagatttacagtataatacaactggcttggcattaataaatttaaaaatttttcacagatggttgcttagtgtgaaacttaatggtttgttcaaatacaatgtgtttatattttgactaacaatatttgatactatttcagaattttgtagcaatcttcttagttgtctttgttgcaaggtgtcttttggtggttctcgtgaactattactagtttataagtgtgttttgaagaccatgataaatagcatgcagcataagagttaaggaagagaaccatatacatttatttactatttaattttattacaggggcagttttcttctagccctattcaggctagtgcaaaaaaatacagcttgggaagcataactagtccttcgcctatttcttcacccactttctcaccaattgaatttcagataggagagactccactctcaggtatgtctcataataaaatacctagttaaaagttttatactatcaatatttgttattagagaggttcttttaatttgtcttaatgatagagctcaaaatgatcactaaccttctaacatttaggaactttgatttttaaataaaagaacagtttaccttcaaaggctggaattctcaccagtttgtactgtagtgttaaatatagttactttaattagcaatatttacatcaaacactatcaaaggaaatttagcaatttccatttgtgctattgtttttgacatcacaatttcactttggtaaacaacacaactgttacagaaatgcagttt

SEQ ID NO: 303 - DNA, 618 bp, Homo sapiens
ctttcagaacaaaggaagtttactgttcattctcctgatgcttcatctggaacaaattctaatgggataactaatccgtgtatcagaagtccttatatagatggctgctcgccaattaaaaattggtctcctatgagacttcagatgtatagtggtggtactcagtatcggacctcagtgattcagataccttttactcttgagactcaaggtgaagatgaggaagataaagagaatattccttccacagatgtctcatcacccgccatggatgctgctggaatacacctacggcagtttagtaatgaggcttctacccatggtacacatttggttgtgactgccatgtctgttacacaaaatcagtccagtgcttctgagaaagaattagcactgttgcaggatgttgaaagggagaaagacaataacactgtggatatggttgatcctatagagatagcagatgagaccacttggattaaggagccggttgataatggcagtttacccatgactgattttgtaagtggcattgccttcagtattgaaaactctcatatgtgcatgtcacctcttgctgaaagcagtgtcattccttgtgaaagcagtaacattcag

SEQ ID NO: 304 - DNA, 618 bp, Homo sapiens; identical to SEQ ID NO: 303

SEQ ID NO: 305 - DNA, 1405 bp, Homo sapiens
tctgcacaaaacaaatatttattttacaaaatattgttttttgcttttccagtgcagcaagcttaaacttccttaaaaacaaacctctgggaagaggaaaatgaggcaagatgctgagaaaaagtcatctcccactctgcccttctctggcaaatcgaagtgtcctcttgtgggaggcggtgggcagcgacactcccgttggacgtcagtgctctcgggcccggccaccccggagcagaactcacttagggcctggtgcccctgtgcccagttctcagaatgtcggagtgctcagttctcagaacgccggagtgccccattcataacctgcagccccgttcatagcctgcagctcccctccttcctctcctcctggtcttcagggagcacccccagctcccctccccactctcaaaccctcctcctccctcccctctctcagttccctgtttgcaggatctcctcctgcccactctccagcccaggtcctcccctctcatctccaattctgcttcacgggccatgacagcaggcaggccatggcctgctctcagcagtttgatcgatggactaaggagatcactcctacgagagtgaaaaagtcaagtgtgcctgagattcggatggggagctctcaaagctatggattgcaagagtcaacaccgcctcaaaagtacaaggccggccgggtgcagtggctcacacctttaatcccagcactttgggagactgaggtgggtggatcacctgaggtcaggagctcaagaccagcctgaccaacatggtgaaatcccgtctctattaaaaatacaaaaaaaattagccaggtgtggtggtgcatgcttgtagatccagctactcgggaggctgaggcagggggagcacttgaacccgggaggtggaggttgcagtgagccgagattgcgccattgcactccagcctgggcaacagagtgagaccctgcctcaaaaagataaaaaaataaaagtacgaggcccggtttaaatgcaggaggaatctggtgagcgagtttcactctgatgcaacagaaaagccaagccaagccttggctgtgcctgatcttggccggggagccacaggcagggtctgctggtttcggtgtcaggggcacatcgccaggaccacgtgtgagatgggaagtgccttgatggaaaactgatacctttttctttccgagtaactttagaatatgtcgcttcaaatataactaatatcctgatttcaatggacttgcatggaaggaaacgcaagttcatttgccagtggggggtgaggactgggagagtggggagcagggtggggaagaggggaccattccacaagctgcaagagcctggacacctccagccttcaataaatagcatttgaatttgctgtgcctaa

SEQ ID NO: 306 - DNA, 1405 bp, Homo sapiens; identical to SEQ ID NO: 305

SEQ ID NO: 307 - DNA, 1405 bp, Homo sapiens
tctgcacaaaacaaatatttattttacaaaatattgttttttgcttttccagtgcagcaagcttaaacttccttaaaaacaaacctctgggaagaggaaaatgaggcaagatgctgagaaaaagtcatctcccactctgcccttctctggcaaatcgaagtgtcctcttgtgggaggcggtgggcagcgacactcccgttggacgtcagtgctctcgggcccggccaccccggagcagaactcacttagggcctggtgcccctgtgcccagttctcagaatgtcggagtgctcagttctcagaacgccggagtgccccattcataacctgcagccccgttcatagcctgcagctcccctccttcctctcctcctggtcttcagggagcacccccagctcccctccccactctcaaaccctcctcctccctcccctctctcagttccctgtttgcaggatctcctcctgcccactctccagcccaggtcctcccctctcatctccaattctgcttcacgggccatgacagcaggcaggccatggcctgctctcagcagtttgatcgatggactaaggagatcactcctacgagagtgaaaaagtcaaatgtgcctgagattcggatggggagctctcaaagctatggattgcaagagtcaacaccgcctcaaaagtacaaggccggccgggtgcagtggctcacacctttaatcccagcactttgggagactgaggtgggtggatcacctgaggtcaggagctcaagaccagcctgaccaacatggtgaaatcccgtctctattaaaaatacaaaaaaaattagccaggtgtggtggtgcatgcttgtagatccagctactcgggaggctgaggcagggggagcacttgaacccgggaggtggaggttgcagtgagccgagattgcgccattgcactccagcctgggcaacagagtgagaccctgcctcaaaaagataaaaaaataaaagtacgaggcccggtttaaatgcaggaggaatctggtgagcgagtttcactctgatgcaacagaaaagccaagccaagccttggctgtgcctgatcttggccggggagccacaggcagggtctgctggtttcggtgtcaggggcacatcgccaggaccacgtgtgagatgggaagtgccttgatggaaaactgatacctttttctttccgagtaactttagaatatgtcgcttcaaatataactaatatcctgatttcaatggacttgcatggaaggaaacgcaagttcatttgccagtggggggtgaggactgggagagtggggagcagggtggggaagaggggaccattccacaagctgcaagagcctggacacctccagccttcaataaatagcatttgaatttgctgtgcctaa

SEQ ID NO: 308 - DNA, 1003 bp, Homo sapiens
tttgtttgtttgtttgtttattttttgagacagagtctcactctgtcacccaggctggagtgcagtgggaccatgttggctcactgcaacttccatctcctgggttcaagcaattctcctgcttcagccttctgagtagctgggattacagacacccactaccacgcccggctaatttttttatatttttagtagagatagggtttcaccatgttggccagggtggtctcgaactcctgacctcaggtgatccgcccacctcggcctcccaaagtgctgggattacaggtgtgagccaccgtgcctggccagaatggcactttcaggatcatataatgtatctattcatctctggtaatattccttgttcggacgtctattttatctgatactaacatctctgccccagctttcttttaatagttcagaatataactatttctgtcccttaccttcaatccacttatgtttttatgttattttttttcttttgtagacagcatagagttggatcttgtttttatatctacccaacctaaaaatctggatatttttattgggaagttgaatttaaatctaccaccttgacacttattttgtattgtctcatctgttctttttaaataatttttccttttttcttccttctattggatcaagaactttttttaaagtgaaagccaatttattaagaaagtaaaggaataaaagaatggctactccataggcagggctgctgagtatttttttattatttcatttcatcttcactattgccttgttatacctcttagtgtagctattcatggttgcaatagggcttatgataaagttacagctgtagcttctcagtctgccattacacaatattctaccacttcacatacatgtagtaacctgacagcagcgcctgtacttcctgcctcccatccttggtactgttgttaccacagatttgcttctgcatgttacaaaccccacaatacacttttcccgtctttgc

SEQ ID NO: 309 - DNA, 1003 bp, Homo sapiens
tttgtttgtttgtttgtttattttttgagacagagtctcactctgtcacccaggctggagtgcagtgggaccatgttggctcactgcaacttccatctcctgggttcaagcaattctcctgcttcagccttctgagtagctgggattacagacacccactaccacgcccggctaatttttttatatttttagtagagatagggtttcaccatgttggccagggtggtctcgaactcctgacctcaggtgatccgcccacctcggcctcccaaagtgctgggattacaggtgtgagccaccgtgcctggccagaatggcactttcaggatcatataatgtatctattcatctctggtaatattccttgttcggacgtctattttatctgatactaacatctctgccccagctttcttttaatagttcagaatataactatttctgtcccttaccttcaatccacttatgtttttatgttattttttttcttttgtagacagcatagagttggatcttgtttttatatctacccaacctaaaaatctggatatttttattgggaagttgaatttaaatctaccaccttgacacttattttgtattgtctcatctgttctttttaaataatttttccttttttcttccttctattggatcaagaactttttttaaagtgaaagccaatttattaagaaagtaaaggagtaaaagaatggctactccataggcagggctgctgagtatttttttattatttcattttatcttcactattgccttgttatacctcttagtgtagctattcatggttgcaatagggcttatgataaagttacagctgtagcttctcagtctgccattacacaatattctaccacttcacatacatgtagtaacctgacagcagcgcctgtacttcctgcctcccatccttggtactgttgttaccacagatttgcttctgcatgttacaaaccccacaatacacttttcccgtctttgc

SEQ ID NO: 310 - DNA, 13928 bp, Homo sapiens
acaagagagagcccagagcttacgtttgagaactatacgttcttcatccattagttatagtcaagagtctggagcagcaggtatttatgtctaattttttctaataaaatatttgacacaaaacactagttattttaactttttaaagttaagtattcctgttttcctttcacttgccgaaagtgtttttaagtgcatttctatcccagaagcactcattctttcctatggaagaaagtggttctgaaattagaaagattatactgtccaggaaaaaaggaagtgttgtgatgatttatataactgatagccaaagatagtctgaaactgttgattataaaggtatctgtccaggtatggtagctcactcctgtaatcccagtactttgggaggctgaggcgggccgaccacttaaggccaggagttcgagaacggcctgggctacgtggtgaaaccccatctctactaaaaataatttatattcctgccagcagtgtattgagataatcatgtactttatgctactagaaaaaaagtcacatgaaattttaacacagaatgttcgacatttaatacttttgtaacataaatgtttttttatacttgtttgctgattgatttgcttctctttcctaaagatttgtggaactcagtagtattagtgttaatttgtaggtatgggtccagaagcaattcagagaggacctgaatatacctaaactgttccctgaagagtcagcagtagccattgggtagttcacttggaaatgatattcctctcctccaagttgggggtgtgtatttattggtcacagaacacacagtcatacagagcaagagagaatgactctggaatcagactgcctgaattcaaatcccacattctctacttactccgtgagcaatcctgagcaagttacttgtctcatctttaaaataaagatactggccagtcacggtggctcatgcctgtaatcccagcactctgggagtctgaggcaggcgaatcacttgagatcaggggttcaagaccagcctgggcaacatggtgaaaccctgtctccactaaaaaaatacaaaaattagctgggcgtggtggcgggcgcctgtaatccccagctactcgggaggtgaggcaggagaatcacttgaacccaggaggcagaggttgcagtgagccgagattgtgccactgccctccagcctggatgacagagtgagactccatctcaaaaaataataatgatgataataataaaataaagatactaataatgcttatgtccatatagttgaaatagttcctggctcatagtaagtgcttttgctatatgaggtaggggaccttagagaaaccacagtcactttctagagatttaagtatgtctgggctatcattaaattaaaaaacgacagaaatggcttttattattttttaaaataaatcatgatttagttatccaaatgaatattggtcttcctcaacgtagtcaccatgggagtttttgtgtttatttcagcagtgcttccctggaatgcctcattggcataacttttaggatatgtcagcttagtatcagtttgatttctgagaatgactaaaagttgctttagagccaagtctagcagctagagtatcataccaggttggattattggtttggtatagatgcaaagtaagatgtgactatatgatcatgagtgatttttcttttatctaaaggagctttgagggtaattatgaaagaaaaccttaccaaatgcttttagccgaacaataacattgttggaataaatagtctcaaggcgattgttttaaaaaaaaacttcatttggaatttgttccatgtttgtttaaaaatcttggctgggcgcaatggctcacacctgtaatcccagcactttgggaggccaaggcaggaggatcgcttgagcccaggagttcgagaccagcctaggcaatgtggcgagactccttctctacaaaaaatttaaaaaattagccgggcgtggtgatgggcatctctggtcccagcaagccaggaggctgaggtgggaggatcgtttgagcctaggaagtcaaagctgcaatgaaatatgattgtgccactgcactccagcctgggtgacagagtgagaccctgtttccaaaaacaagaggaagaattagaaatgcagtgagggctgggcgcagtggcttatgcctataattccagcactttgggaggccaaagcggccagattgcttgagctcagaagttctaaaacttcaacagcctgggcaacatggtgaaatcccgtctctactaaaaatacaaaaattagccaggcgtggtggtgtgcatctctagtggtgtgtgccagctacttgggagattgaagtggaggattgcttgaccccaggaggtggaggttgcagtgagctgccattgtgctactgcatgctagcctgagcgacagaacaagaccctattaatttaaaaaaaaaaaaaagtgtagtgaacttggcttctcgcagactcgtagaaagttaaaaaggaagctaccatctaaatggttttattattattccagatattttggtattgttttctgtatcatgatagtctaaaaaactagttttacttttaatattaattggtataataattagttgttttttttccccagtcactgaagatgtgtgcttagttacataaagtacattaatatttgtgtttataaaataatacaatatttatagtataatgtttatatatgtgtttaaattgtgacagcactgcatccacttgaggctcttttttatagctactaggaggtttaggcacttggagttaaattttaaatgaaccacatatttttcatttttgttaatgtagttttcccattttatgcaaataaaatatttaattggctctccactcctgcctctgtccccttaccgctaccaccctaagagattatcattgttaacatttgaggacatggtgttttgtaacctgttgttttttcttaatatgacaatggcccatattttagcagtaaacaaaaagatacagaagatgaaagcttagccaaacactgtaaatagaaatgggaagctttttcatatcggggaacggtggcttaattgattcttggggaatgggggatcaactaaccataaacaatttcatttaggatttttgcatcatgagggtatttggagagaaatatatcatcctataatgtgcacagtaagtttttcctaatttgttgctttgaggaaagacacaaagcaaactaaacagcctttcatagataaataagtatacagagagtgaaagatatgggtacaagtatatagagacctatcaaaaatacattgcttgtggtattaattctcatgtgtgattttagcatattaaaaggctgttttgtgtttttagaaccataagaataaatggggatgttacctttcagtttgttccaaagattgcatgcatcattaccaaagcttgagtctttttactcccctgtcttgttgagatacctactacttgagcatactctggaatgagaaagtttatcgattaacatgctgcttacgcagataggattagcatttccttaatttagtataccacgtgttgtatcaggcataaaagccagctttttttagtcataccccaatgtttaaaattgttaaatgcagacttcatgttcttttgatcatttaaatcatgacatggatatttttaatttttatattctagtaattatcaattgtcctggtctggctgcttagagtatcagtttgctcaaaattgcttgaatcattaaagcaaatactaattgtgagcattgaccagatcttaagttaaaaaaaaaaaaaaagcatctttggtcctagaagaagtgctaaggaaacctgaattaactgataaagcacaggtaaagtttgaccataaaacttgtagaaagaatggaatatagcttaatgcttataatgtaagacattggaacaaatacttaaattcagtggttagcactataaatatcttttcttaactgtgagtagttggaaaatatagctggctaatagtaattacaagttactatttaaacagatgccaacatgcaaagtagttgtataattttcctaaagttatgttacacttgattttaacttgacgccattgtgcattgtaaccatattattatacaaggagcatagaccaacaacagttgagtaaatgggtgaataaatgaataaaaaggataaacacaactaatttaaaagtcatgagcataactaacaatgattgcttttattctgaaactgttttccatggtttataacgttcatagccatatgacccttccttaatctcttccttccttccttgtattttgggtactgattctttgcaaggtccatctctcttttgtgtgaagtaaaatactgggaaaaggctgcttttctaaagatacctgttttgctatttttatagtgcttataactgatgtaattagaagaaataaattcatagtgctttggatatagcacctcagattaatatcaaattgtcacctcctgttagtgttcattcactaaaggaatagtgtacagaacgtgtacatttgaattaagggaagatggttagaaaagttctggaaccgggaactaccattcagaagacttctatgggaccaggacaaagacaaactttacgtagttcacaatttgcctagagctgtccttgattctcctttctctttttattctttttttattctttgttctcattgttttactactatgttttaaaaatgtttataacttgatattttaatgtaaagtatgttttcttagaagggaagaaaaaatgctttatatactaaaaacagcaggctgaagctataagttaacaaactacatcttaagattttttgacagtgctacaattggtaaactgctagaagttatttttagaccagttttatgtacttaatagatttctctgtgttcccaatagctgatgatataaagccatgtccacgatgtgctgcttatataataaagatgaatgatgggagctgcaatcacatgacatgtgctgtttgtggttgtgagttttgttggttgtgtatgaaagaaatctcagatttgcattatctaaggtaagcttatagaaggagctatttatatgtaaatgtaattttatattgtaagacaaaataacttgtcttaaatttgggttttataagatacttaaagggattggttttattctagttaaataaatttaaaagaaaccaagttattatgctagtcatttggaattaataactagtcaaaataggaaatggatatttcctttttttgtttttgttaaactagaatgctagtaagtatgtaataccctgtgtaattatgctagacccataaatactttcatttaattttcccatacataaattttatcatttaggcacagagtgagtttatgatataatcagataattgatgcctaaaaatatgcatgttttgcattagtttactattaaaaaactgacttaagggtttgaggataatggaggactagggataaatttttaacctgaatctcagttatcagtatcttgttaatataatttacagtggttcttaccttatacttcattgaattttcccatacataaattttatcgtttaggctacagagtgagtttgtgatataatcagataattgatgcctaaaaatatgcatgttttgcattaatttactattaaactgacttaagggtatgagggtaatggaagactagggataaatttttaacctgaatttcagttatcagtatcttgttaatataatatagattaaataataaaatataatataaaataagatatatcaatatcttgttaatataatttatagtggttcttaccttagtttaatgaactcagaatttaaaggggaaaaaagctcctaactatgagaagtttttaaaaatagtcattgttttaatatagtgcactaatttgttattgtggtgttttgcagcagttatttacattataattttttccgttagtccatcaggatgtactttttgggggaagaaaccctggagccgaaagaagaaaatattgtggcaactgggaacactggttggtgctcctgtcggaatcgctttaatagctggcattgctattcctgcaatgattattggcattcctgtgtatgtgggccgcaaggtaaaatgcatacttcttgttagtccattatcttattctaaatctttaggtgtattcttttagtattgatgatttttgggtttttttttttttttttttttagacaaagggtatctttagtttcttcagtataaaacagttactcttttttcataaatttttagtgtttggcaagcatatataaatacgtataaagcagacttgctttaaaatgttctgaatctgaaaattttagtatgtttgtattataaaactttgagtataaaatattgaaggatacacacctgagatttttctcataggtatatccttgtaaggtcaggtctatgagatctttttaatgaaagttaatagctaaataacacatgccctcaggcaaagaataattagccagttcttgaattatttctgctgtagttcaaagctttttttttggattactgcttttaataaatacactattttgcaaattataacaatcttgtgaaagtccaaacaccagtgactaccactggcctctaattgatgaattatatttcattagctaagcaaatagttcttttgttaagggttaatgggataatttatgaggtcctaagaagtctgttgttgcctaaattaatagaatctctggattgagaagtaactttcagtagaatatagctaaaagaaaaaaaaaagaaattttctttggtatccaagaagatcaaaaaaattaaaactttttttaaaaaataaaaagaaattaatcccaaccttgtacccaagcagaacaaaggatagcaattttcaaaaagggaactaacaggccaggtgcggtgcctcacccctgtaatcttagcactttggaaggctgaggctggtggatcatctgaggtcaggagttcaagaccagcctggccaacatggtgaaaccccatctctactaaaaatacagaaaaaattagccaggcatggtggcaggtgcctgtaatcccagactcgggaggctgaagcaggagaatcacttgaacctgggaggtggaggttgcggtgagctgagattgcaccattgcactccatcctaggcaacaagagcaaaactccatctcaaaaaaaaaaaaaaagaactaacaagctgggcatggtggcttactcctgtcatcgtagcactttgggaggctgaggcagaaggatcacttgaggctgggagttcaagaccagcctggacaacatagtgagaccccatctctcaaaaaaatttaaaaattatctgggtatggtagtatgcacctgtagtcccagctacttgggaggctgaggtgggaggattgcttgagatgggcaagtggaggctgcagtgagctgtgattgtgccacttcactccagcctgggtgatagagcaagatcctatctctaaaataaaaaaaggatctaaaggttgtcatactgtgtcataggtgttgtatgtacttttacttattttaaccctgcagcaacctcgatatttcggtctctgtgtgttaaaatattgagatttaggaaagtttatgtaatatatcttcagttacacacaaagaagcagagctgagatttgaactcagatgcatgaattcttaatataagttccatgattaagtttcagtagctatttgggaactcagtcatggggaaaccaccaactcatgaagcaatccattctgttgtaaaatggctactaattgttacaaaattgttacgtttgagtcagatctgtttccttttgtttcctttatttctgtttctaacttctgggacccgactgggaataaggttgatcttcttctgtaaaacagctgaattttttatattcaacatacattttataatcagaaaaataatatatactatttcttaaaaattagttttggggctgatgacaaacatatttataagtcacatatttatttctgaaggttttaagtgagtaaacctggactttaaaaaatgttgggccatgtgtggtggctcatgcctgtaatcctaacacttggggagggtgaggagggaggattgcattaatccaggagtttgagaccagcctgggcaacacagtgtgacaccttgtctctacaaaaaactaaataatcagctgggagtggtggtgcatgcctgtagcccccgctattaaggaagctgggatgggaggattgattgagcccgtgaggttgaggctacagtgagctgtgatcgtgccactgcactctagtctgagcgacacagagagaccctatttccaaaaaagagagaaaaaataaaaaatttcaaaatatattagctgatcgtaatttttcatgtagttattcaaagcaaggctttgctgaaaacaaaactattcagatacttagaagggaaagagagactgttgtaccacatgtacctataaatcatttatagagaagagattatttacctcattgttcaggtcatagggtacagttacagatctccttttttcaaacatgtacccaaagggttgtaaatgaatgaattagttttccattgaaataatattctgtggtgctttgggatcccaaccagcctaggaaaacctgctaagtcaataaagtacccaaaagctgagccttcacttaacaataaaaagtagagaatgtggcaaaaaatagtaaacagaaaaattaagttgaaccagaaatagtgggataatgtgatcactaatcaaacattggtgcttgaggctgaaaaattttctagaagactcctttctcttggcagcctgcctttgcaagtctgctccatcagttgtgccttttctcttcttcagtgctaagtttcccaggaatgggagtggggaggagcaggaattagctgcagtgctgaaggataatgaaaggtaccttgggaaggtctaccatctctgcctgcatggactgtgtagggaagtgaggaggctcattgacaaggaacctctagtcaatgctgggaaatgggattctgactaggaaatagaaaggtttcttgtcccatacatgcatcacccacctcccaccccaacctttctactgttttccacaacactcatcgtactttacagccttccaaaggccaaaggtgttattataccatgtaataatagattattttataagtcccatctgtagtattgtttataagtcattttattttagagagtccccatacttttgaggctgttttgaatttgttttggaacagagggggaaaatgtgccatattagcccttgcaaaccatgaaaataaagatctcaaagttcatataatttcacaagccagtttttaatcaccgcttctatgatgatatcaaattctacttattaacacctgtcctgtacagagattgctgagtgaattcaatcctgtcttctggtagccattatttatcatcttttttctttctctgccatttactttgagctataaatgagagccctggaatttgagtcatttgtcaatattgtcttcataaaaaggatctgagaaaaaaataatactgtttattcatacttgtttattagaactgctttttaaggtcaatttttaaaaagaaaccttccctagaagccaatttttaccatttagagaatattctttagaaagaaacctttagaatgctggaagtatcctgttggtgaaccatgtaactcataactgtgttgaaaataataatcttaatttcttcctctttgctcgatacataattacactacttttgattaagattataaagatgacttttactcagaacttttaagcacaaagtaaaatccattaaatcactgtcttaagcaaattaataaggagcaaattatttgtgagaatatataatagtttaaggacactagtaggtttaccttgaactaagatactcagctacgaacttctatgaaaaatcactttagcaagtatagatctttttcaactaagttaaattgtaatgtattttctctttaatcccccacccctatttttattaattcaagattcacaatcgctatgaaggcaaggatgtttcaaagcacaaacggaatttggccatagcaggtggtgtaacgttgtctgtaatcgtgtctccagtagtagctgcagtgactgtaggtaagaaaatgctgaaaagtactaattacctacaattttatggagttaaagttttgtggaaggattttttttaattgttttttaatttgaggacaatttaaattgagcctgcagtaagtcttggttgaaagtattacagattcaagagcctagccttaaagtagttggtaaattgttagtggctgatacccttcctccccactccaccccaagtacagttcggaggcctggcacttcaaaagaaaaaagtttgcatctctctctttttccccttatgtgcattacctgaaaggctgggaaccttgaatttgcttaacaactgggtaaatctacttttggcaaatgttccagccaactcttcagaaccctggcgcttttctctgtatgactctcttgaaaagactttctaaaactcatgtttctgtgagttattttgttgttgttgtttgtaatgactgatttaatttctctttaggtatcggtgttcctattatgttagcttatgtctatggcgtagttccaatttctctttgtcgaagcggaggttgtggagtctcagcaggcaatggaaaaggagttaggattgaatttgatgatgaaaatgatataaatgttggtggaactaacacagctgtaggtaagtcctttaagcaaaggaagaaaatgtgcttattaacagtgtaagtagtggggaggccagagataacatgcaactcagaatttccattgccatccttttactaggcctaatagtattcattcagaagtacataagtgaataaactgccaaggaggagtgtatggatgaaagaggtgggggtaattctgggtatctgacctctaattggaatataatgtcttagaaatcataaacttttcatcttaaattttgcctgaaacattataaataactaagtaaaggatatgaagaggaatacagttaataaaagaaatacggatgaccaataatacaaaaatatcttcaactcaatgttattcaaagaaatgtgaattagaacagtaacgagcaaagattaagaagaataaaaaagccttcatagactgcctataggagtatgtcaataaaccttttttaaaaagtgcatgttctatattctagcaattcttgttttagaaatttgtcatagggaaataattaggcagatgtgtaaagataatgcctactttcttacctcttattttctcttgaactggcctcaatcagatttttgtccctaccactccagaattttatttctgctattcactgaagcagagtcaccagtggcctccacgtaacctaatacagtggtcaggtcttggtcctcatcttaacagtatatccgacatggtagagactctacccttcttgaaatacttcacttttcttatgggaaaccacttcttaccatatttcctggccagtccgtctcattaatctttgctggttcattttcctcttctgacctctaaatgtttgttccccagagctcagttctcagaattcttatgtatctacacttttcccctaatctcatctattaaataatgcatagaccgacctctcccctgaacttcaaacttgcatgtgtaactttcctctttaatctgcacttgagtgtctaacaagaatttcaagcttaacttgtctacagccaaattcttggctctaaaatctcttcttcccttcatcctccttaactcaataagtagcttctccattcctcctgttgcttgggccaaaaaccttcacttaacaatgcctccctcttttccctcttgtcctacatctgattgatctgtcagcaaattctgctgcttccttcaatatttagccataatccagccacttcttactctcttcgttgtccttcccttagtccaagctaccatcctctttcctgggctattgtaatagcctcttaactgctgtatcaacttctcagcttctattcactagtccatagtgcagccatagtcacatgtctaaaccctgtcagattataactttcttatgctcaaaacttccccagtggcttctaactgtactggggaagaaaatccaaagtccttatcatagcccaaaaggccccacatgatctgccccaactatgtctctgagctcatctcttgtcaccctcttattttataccactcttgcttgatttttgagggtgccaagcattatcctacttctaggcttttaaactggcagttctctgtctggaatactctttccctagaaaatttcatgactcactgttttacttcatttgtctctacaagtattaccttatcaaagaggccttctgtcatcacatcatataaaatggctcacagacatgtacgtacatgcacttttcatcactctcctcccctttactctcttgtatttttcctcatagcatttgtcaccgtgtgattgggtatataataggaactcaaatattggtgcaaataagtgactccttaatacaaaatgtgtgagaggtactgtaaaattggaacatagtgttatcagatcttaataatagcttgtagacagaactgtggcatatatctagaaatcaacttttagcctattcttactgacctagagaataataagctctttaaatgacacccttaatgaaaactgtcacataattttcctctaaagtcagcgatattttttaacaatcatattctttatagaattcctaaatctgggtttttgaaaaaagaaactagtgaccatttaaaattgttggctctattcccactgcttctagtggactagcctgaaaaaaatatttttccatgtctgcgtatattttataccttatataatgtcctctctgaaatcatggaggaatttaagaaggagaaaattgataatcatacttacttagtttctttggaatatttgcatttagacacaacatcagtagcagaagcaagacacaacccaagcataggggagggaagtgttggtgggctgactggcagtttgagtgcaagtggaagccacatggatcgaataggagccatccgagacaacctgagtgaaacggccagcaccatggcactagctggagccagtataacggggagtctgtcaggaagtgccatggtaaactgttttaacaggtgtgtgttttggtttggtttggttctgctttctggtaactacaaattattaattaggtgagaattttgaacataaagcatgatgattatatataaccctactatgtcaaggttcaaaatagtaatgttaaaaatgaaatttggggccaggtgcagtggctcacgcctgtaatcccagcatgttgggaagccaaagcaggtggattgcctgagctcaggagttcgagaccagcctgggcaacatggcgaaaccccatctctactaaaaaaatataaaaaattagccggatttggtggcatgcacctgtagtcccagctggtcgggaggctgaggtaggaggatcacttgagcctgggagttggaggctgcagtcagccaagatcacaccactgagctccaacctgagtgacagtgagaccctgtctcaaaaaaaaaa

SEQ ID NO: 311 - DNA, 5055 bp, Homo sapiens
tatatctagaaatcaacttttagcctattcttactgacctagagaataataagctctttaaatgacacccttaatgaaaactgtcacataattttcctctaaagtcagcgatattttttaacaatcatattctttatagaattcctaaatctgggtttttgaaaaaagaaactagtgaccatttaaaattgttggctctattcccactgcttctagtggactagcctgaaaaaaaatttttccatgtctgcgtatattttataccttatataatgtcctctctgaaatcatggaggaatttaagaaggagaaaattgataatcatacttacttagtttctttggaatatttgcatttagacacaacatcagtagcagaagcaagacacaacccaagcataggggagggaagtgttggtgggctgactggcagtttgagtgcaagtggaagccacatggatcgaataggagccatccgagacaacctgagtgaaacggccagcaccatggcactagctggagccagtataacggggagtctgtcaggaagtgccatggtaaactgttttaacaggtgtgtgttttggtttggtttggttctgctttctggtaactacaaattattaattaggtgagaattttgaacataaagcatgatgattatatataaccctactatgtcaaggttcaaaatagtaatgttaaaaatgaaatttggggccaggtgcagtggctcacgcctgtaatcccagcatgttgggaagccaaagcaggtggattgcctgagctcaggagttcgagaccagcctgggcaacatggcgaaaccccatctctactaaaaaaatataaaaaattagccggatttggtggcatgcacctgtagtcccagctggtcgggaggctgaggtaggaggatcacttgagcctgggagttggaggctgcagtcagccaagatcacaccactgagctccaacctgagtgacagtgagaccctgtctcaaaaaaaaaaagaaaaatttggtggtagatttctaagtctaaggaataacattctgccaattttttcactgtccttgtcacattttatattataaatcgttgctacagctgcttcagtagacattgaagcaaaggcagtacttaagcctagatcttacctctgtgggtaacaacagccagatattaggagatgggactttggctgagtcctgggaaacaggtggagtcaggacatccaggaatgtgtgaactgggaccgggataatcggctagggtccttttatgtattaatgcttgcttactttgttctcaccaagtcttttatcaatagccatatagataagtaggaaaaattatcttcccctgtttctctttaattcactatttttcacttaggcttattagccttgctttttttaagtgtaggggagaatacatgaattaaaagataaattagacatcttatttttaggtagtttgccttttaaatacaaactcttaagttatagtggtatatactacctctttttaaaaaggcaaatgttggttgggctcagtggctcatacctataatcccagcactttgggaggccaggttgggaggatagcttgaggccaggaatttgagaccagcctgggcaacataacgagaccctgtctctaaaaatatatataaataaataaagtattaaaaggcaggtgttatttatagagtcattttttaatatagatgcccaggatttttggattcattggtgtgtcatgtttaatgattaataatgtattctaactttgtgttttgcattgaaacattacaaagtgccatatgctgagtgagaataatggagtacatttaagtgaaaatcctttgtgtcttttttgtgttatttcattaccactttacttggcagacagctgatgttccccattttatttggatggctggtactatgcagtgtgctgcagtagaatttaaattaaataaaaggaaataaaaaataatggttcctaaaatagcttctggttactagggttcttaactgaattatttaaagatacatattacagtagtgctgatattaaatataattttggtgatttcatacccccctttaaggttggaagtacaagcagatgtacagaaagaacggtacagtctaagtggagaatctggcacagtcagcttgggaacagttagtgataatgccagcaccaaagcaatggcaggatccattctgaattcctacatcccattggacaagtaaggaaaaaactgttaaaaaattgaaagtattttttaaattaaaggaataattcctatcattagacaaattaccagtgaaaagtggctaccaactattaagttctctgagaaaaggaaacagtgagctgtccagagtaggcaaatctgtatagatcataaagtggatttgtggttgtcaagggctgggaaagggaagaatggtaactaactgctaatggatgcaagatccctttttgggatcatgaaaatgttctgaagttaggtagtggtgatggttgcacagctctgatcacaactaaaaatcactgaattgtacactttaaacaggggaattgtatctgaataaagctgttctttaaaaaaaggtagcatagtgtctagaacagcataagcaataaatgtgtccaccactattttaaaacattgaagcattataaagagttctgttatatcaagtatgttttttaagtagaacgtgttctgcgttaaggtgttctcatagcttatatatagtctgaattttccacatagaaacccttcccccagtcatctgaacaaaaagaagtcagcaattatgtttgtatttgttactcttatatttcagagaaggcaacagtatggaggtgcaagtagatattgagtcaaagccatccaaattcaggcacaacagtggaagcagtagtgtggatgatggcagtgccacccgaagtcatgctggcggttcatccagtggcttgcctgaaggtaaatctagtgccaccaagtggtccaaagaagcaacagcagggaaaaaatcaaaaagtggtaaactgaggaaaaagggtaacatgaagataaatgagacgagagaggacatggatgcacagttgttagaacaacaaagcacgaactcaagtgaatttgaggctccatccctcagtgacagtatgccttctgtagcagattctcactctagtcatttttctgaatttagttgttctgacctagaaagcatgaaaacttcttgtagtcatggttccagtgattatcacacccgctttgctactgttaacattcttcctgaggtagaaaatgaccgtctggaaaattccccacatcagtgtagcatttctgtggttacccaaactgcttcctgttcagaagtttcacagttgaatcatattgctgaagaacatggtaacaatggaataaaacctaatgttgatttatattttggcgatgcactaaaagaaacaaataacaaccactcacatcagacaatggaattaaaagttgcaattcagactgaaatttaggcccataaatgctgcagaataattaccactgtacaaccgtgtttggagctggttgaactacatgtgactacttaagtttcaggttaccagcaaaagccgggtttcattatcataatgcagatacattttctgtgttcagcaaggcattgtgtgtcatgtggatcttagttaccaaactatgaagtgaaggctttaaaagtgcattattttaaggataataaatttgaagagcaaagcatgttttgtgtgtttgccacaaaacattgcttgaagcacatacttagatagaaattggtcttaatttatataatcaatataaaatactaatgcaattctacagcattcaaatgaagaaaacttgaggctttagggataagtggttagtgatattttattgaaaccactaaagagataagtttaaaagaactgcataggttactctcagtatatgatactctgtgacatttctatttatatcggcataaatttcattttttttcttcatatgcaatgtggttatataaagcttaatgcagctcatttgctaccatttggatacttagacactttgagcaagattgtggcagtttttgcacaactttgaaatagaaatacctggtactctatcttgtttattgttgatgccatcttagaggaaaaaatgtaaaggtaagtaattaagcatatgacagcaacaaataagatacataaaactacaaaataaagtcccattaggttataagtattacaaaaaatccacctttctctaaggggaagtttgtaccccattgattcttggtgcctttgggatcgactgggttttaatggcctagttatttgaggattttgctgtgttgttttccatgtcttctctggtcaccttggattatatataaaaatacaggaaatagataaacatgaatgtgattaataatgctgaaaaagtattagcctaccaaagacacactcaggctttagtgaataactttacataacctcagtttttaacacatgcatatcttctccaaccatgaaatcaaagcacggtgcagaacttgtaccaagtacaaaaggtccatgtatgattagcattattttcttttgcttttgtttatggacaatgttcagctgacataagcagaagttggccaaaatactgcctgtactgttaatttcctgtataattcacttaaataaaagcaggttaacctcaatgatagcagttaaaatgttctatcttatgtatttcttttaagtattaccattatggtgctactgagcgttttcttttggtaaaaagaaaaatgccatgggctgcagtcttcttccatcacttttccctaccaggtccattaatatgcttataacactagtgccagttattttatttgataatgcttatggtatttgtatatttgtttgcattccaattttgtttaataatgagtgtgtaaactgcatacgttaaataaatgtaaatactaatgtactgctgc

SEQ ID NO: 312 - DNA, 6784 bp, Homo sapiens
ttaatcccccacccctatttttattaattcaagattcacaatcgctatgaaggcaaggatgtttcaaagcacaaacggaatttggccatagcaggtggtgtaacgttgtctgtaatcgtgtctccagtagtagctgcagtgactgtaggtaagaaaatgctgaaaagtactaattacctacaattttatggagttaaagttttgtggaaggattttttttaattgttttttaatttgaggacaatttaaattgagcctgcagtaagtcttggttgaaagtattacagattcaagagcctagccttaaagtagttggtaaattgttagtggctgatacccttcctccccactccaccccaagtacagttcggaggcctggcacttcaaaagaaaaaagtttgcatctctctctttttccccttatgtgcattacctgaaaggctgggaaccttgaatttgcttaacaactgggtaaatctacttttggcaaatgttccagccaactcttcagaaccctggcgcttttctctgtatgactctcttgaaaagactttctaaaactcatgtttctgtgagttattttgttgttgttgtttgtaatgactgatttaatttctctttaggtatcggtgttcctattatgttagcttatgtctatggcgtagttccaatttctctttgtcgaagcggaggttgtggagtctcagcaggcaatggaaaaggagttaggattgaatttgatgatgaaaatgatataaatgttggtggaactaacacagctgtaggtaagtcctttaagcaaaggaagaaaatgtgcttattaacagtgtaagtagtggggaggccagagataacatgcaactcagaatttccattgccatccttttactaggcctaatagtattcattcagaagtacataagtgaataaactgccaaggaggagtgtatggatgaaagaggtgggggtaattctgggtatctgacctctaattggaatataatgtcttagaaatcataaacttttcatcttaaattttgcctgaaacattataaataactaagtaaaggatatgaagaggaatacagttaataaaagaaatacggatgaccaataatacaaaaatatcttcaactcaatgttattcaaagaaatgtgaattagaacagtaacgagcaaagattaagaagaataaaaaagccttcatagactgcctataggagtatgtcaataaaccttttttaaaaagtgcatgttctatattctagcaattcttgttttagaaatttgtcatagggaaataattaggcagatgtgtaaagataatgcctactttcttacctcttattttctcttgaactggcctcaatcagatttttgtccctaccactccagaattttatttctgctattcactgaagcagagtcaccagtggcctccacgtaacctaatacagtggtcaggtcttggtcctcatcttaacagtatatccgacatggtagagactctacccttcttgaaatacttcacttttcttatgggaaaccacttcttaccatatttcctggccagtccgtctcattaatctttgctggttcattttcctcttctgacctctaaatgtttgttccccagagctcagttctcagaattcttatgtatctacacttttcccctaatctcatctattaaataatgcatagaccgacctctcccctgaacttcaaacttgcatgtgtaactttcctctttaatctgcacttgagtgtctaacaagaatttcaagcttaacttgtctacagccaaattcttggctctaaaatctcttcttcccttcatcctccttaactcaataagtagcttctccattcctcctgttgcttgggccaaaaaccttcacttaacaatgcctccctcttttccctcttgtcctacatctgattgatctgtcagcaaattctgctgcttccttcaatatttagccataatccagccacttcttactctcttcgttgtccttcccttagtccaagctaccatcctctttcctgggctattgtaatagcctcttaactgctgtatcaacttctcagcttctattcactagtccatagtgcagccatagtcacatgtctaaaccctgtcagattataactttcttatgctcaaaacttccccagtggcttctaactgtactggggaagaaaatccaaagtccttatcatagcccaaaaggccccacatgatctgccccaactatgtctctgagctcatctcttgtcaccctcttattttataccactcttgcttgatttttgagggtgccaagcattatcctacttctaagcttttaaactggcagttctctgtctggaatactctttccctagaaaatttcatgactcactgttttacttcatttgtctctacaagtattaccttatcaaagaggccttctgtcatcacatcatataaaatggctcacagacatgtacgtacatgcacttttcatcactctcctcccctttactctcttgtatttttcctcatagcatttgtcaccgtgtgattgggtatataataggaactcaaatattggtgcaaataagtgactccttaatacaaaatgtgtgagaggtactgtaaaattggaacatagtgttatcagatcttaataatagcttgtagacagaactgtggcatatatctagaaatcaacttttagcctattcttactgacctagagaataataagctctttaaatgacacccttaatgaaaactgtcacataattttcctctaaagtcagcgatattttttaacaatcatattctttatagaattcctaaatctgggtttttgaaaaaagaaactagtgaccatttaaaattgttggctctattcccactgcttctagtggactagcctgaaaaaaatatttttccatgtctgcgtatattttataccttatataatgtcctctctgaaatcatggaggaatttaagaaggagaaaattgataatcatacttacttagtttctttggaatatttgcatttagacacaacatcagtagcagaagcaagacacaacccaagcataggggagggaagtgttggtgggctgactggcagtttgagtgcaagtggaagccacatggatcgaataggagccatccgagacaacctgagtgaaacggccagcaccatggcactagctggagccagtataacggggagtctgtcaggaagtgccatggtaaactgttttaacaggtgtgtgttttggtttggtttggttctgctttctggtaactacaaattattaattaggtgagaattttgaacataaagcatgatgattatatataaccctactatgtcaaggttcaaaatagtaatgttaaaaatgaaatttggggccaggtgcagtggctcacgcctgtaatcccagcatgttgggaagccaaagcaggtggattgcctgagctcaggagttcgagaccagcctgggcaacatggcgaaaccccatctctactaaaaaaatataaaaaattagccggatttggtggcatgcacctgtagtcccagctggtcgggaggctgaggtaggaggatcacttgagcctgggagttggaggctgcagtcagccaagatcacaccactgagctccaacctgagtgacagtgagaccctgtctcaaaaaaaaaaagaaaaatttggtggtagatttctaagtctaaggaataacattctgccaattttttcactgtccttgtcacattttatattataaatcgttgctacagctgcttcagtagacattgaagcaaaggcagtacttaagcctagatcttacctctgtgggtaacaacagccagatattaggagatgggactttggctgagtcctgggaaacaggtggagtcaggacatccaggaatgtgtgaactgggaccgggataatcggctagggtccttttatgtattaatgcttgcttactttgttctcaccaagtcttttatcaatagccatatagataagtaggaaaaattatcttcccctgtttctctttaattcactatttttcacttaggcttattagccttgctttttttaagtgtaggggagaatacatgaattaaaagataaattagacatcttatttttaggtagtttgccttttaaatacaaactcttaagttatagtggtatatactacctctttttaaaaaggcaaatgttggttgggctcagtggctcatacctataatcccagcactttgggaggccaggttgggaggatagcttgaggccaggaatttgagaccagcctgggcaacataacgagaccctgtctctaaaaatatatataaataaataaagtattaaaaggcaggtgttatttatagagtcattttttaatatagatgcccaggatttttggattcattggtgtgtcatgtttaatgattaataatgtattctaactttgtgttttgcattgaaacattacaaagtgccatatgctgagtgagaataatggagtacatttaagtgaaaatcctttgtgtcttttttgtgttatttcattaccactttacttggcagacagctgatgttccccattttatttggatggctggtactatgcagtgtgctgcagtagaatttaaattaaataaaaggaaataaaaaataatggttcctaaaatagcttctggttactagggttcttaactgaattatttaaagatacatattacagtagtgctgatattaaatataattttggtgatttcatacccccctttaaggttggaagtacaagcagatgtacagaaagaacggtacagtctaagtggagaatctggcacagtcagcttgggaacagttagtgataatgccagcaccaaagcaatggcaggatccattctgaattcctacatcccattggacaagtaaggaaaaaactgttaaaaaattgaaagtattttttaaattaaaggaataattcctatcattagacaaattaccagtgaaaagtggctaccaactattaagttctctgagaaaaggaaacagtgagctgtccagagtaggcaaatctgtatagatcataaagtggatttgtggttgtcaagggctgggaaagggaagaatggtaactaactgctaatggatgcaagatccctttttgggatcatgaaaatgttctgaaattaggtagtggtgatggttgcacagctctgatcacaactaaaaatcactgaattgtacactttaaacaggggaattgtatctgaataaagctgttctttaaaaaaaggtagcatagtgtctagaacagcataagcaataaatgtgtccaccactattttaaaacattgaagcattataaagagttctgttatatcaagtatgttttttaagtagaacgtgttctgcgttaaggtgttctcatagcttatatatagtctgaattttccacatagaaacccttcccccagtcatctgaacaaaaagaagtcagcaattatgtttgtatttgttactcttatatttcagagaaggcaacagtatggaggtgcaagtagatattgagtcaaagccatccaaattcaggcacaacagtggaagcagtagtgtggatgatggcagtgccacccgaagtcatgctggcggttcatccagtggcttgcctgaaggtaaatctagtgccaccaagtggtccaaagaagcaacagcagggaaaaaatcaaaaagtggtaaactgaggaaaaagggtaacatgaagataaatgagacgagagaggacatggatgcacagttgttagaacaacaaagcacgaactcaagtgaatttgaggctccatccctcagtgacagtatgccttctgtagcagattctcactctagtcatttttctgaatttagttgttctgacctagaaagcatgaaaacttcttgtagtcatggttccagtgattatcacacccgctttgctactgttaacattcttcctgaggtagaaaatgaccgtctggaaaattccccacatcagtgtagcatttctgtggttacccaaactgcttcctgttcagaagtttcacagttgaatcatattgctgaagaacatggtaacaatggaataaaacctaatgttgatttatattttggcgatgcactaaaagaaacaaataacaaccactcacatcagacaatggaattaaaagttgcaattcagactgaaatttaggcccataaatgctgcagaataattaccactgtacaaccgtgtttggagctggttgaactacatgtgactacttaagtttcaggttaccagcaaaagccgggtttcattatcataatgcagatacattttctgtgttcagcaaggcattgtgtgtcatgtggatcttagttaccaaactatgaagtgaaggctttaaaagtgcattattttaaggataataaatttgaagagcaaagcatgttttgtgtgtttgccacaaaacattgcttgaagcacatacttagatagaaattggtcttaatttatataatcaatataaaatactaatgcaattctacagcattcaaatgaagaaaacttgaggctttagggataagtggttagtgatattttattgaaaccactaaagagataagtttaaaagaactgcataggttactctcagtatatgatactctgtaacatttctatttatatcggcataaatttcattttttttcttcatatgcaatgtggttgta

SEQ ID NO: 313 - DNA, 377 bp, Homo sapiens
cagccagtgtttacatactggttgatttttgaatgccaaaaatagtattctaaacttggggagagttatgttatttagggtggctattatctaatagctggatatgaaaaagtttgcagttttaaaatttagttcagattggatcactgtacatcatatgctagtcagaatttttgtgacttctaccaatttattcgttcaacaaagtagatgctggaaatacagcatagtaccaaataaacaaacaccctggcttcagagggcttgtattagaatttggaggatacaaaaataataaacatatgcatgtagcttaaaataatggaacgagatgtaaaataaccagatgatgattgctatgaaaaattagaggtggg

SEQ ID NO: 314 - DNA, 760 bp, Homo sapiens
ggaaagtttatgtaatatatcttcagttacacacaaagaagcagagctgagatttgaactcagatgcatgaattcttaatataagttccatgattaagtttcagtagctatttgggaactcagtcatggggaaaccaccaactcatgaagcaatccattctgttgtaaaatggctactaattgttacaaaattgttacgtttgagtcagatctgtttccttttgtttcctttatttctgtttctaacttctgggacccgactgggaataaggttgatcttcttctgtaaaacagctgaattttttatattcaacatacattttataatcagaaaaataatatatactatttcttaaaaattagttttggggctgatgacaaacatatttataagtcacatatttatttctgaaggttttaagtgagtaaacctggactttaaaaaatgttgggccatgtgtggtggctcatgcctgtaatcctaacacttggggagggtgaggagggaggattgcattaatccaggagtttgagaccagcctgggcaacacagtgtgacaccttgtctctacaaaaaactaaataatcagctgggagtggtggtgcatgcctgtaccccccgctattaaggaagctgggatgggaggattgattgagcccgtgaggttgaggctacagtgagctgtgatcgtgccactgcactctagtctgagcgacacagagagaccctatttccaaaaaagagagaaaaaataaaaaa

SEQ ID NO: 315 - DNA, 422 bp, Homo sapiens
cttaaattttattgacagctctgaaaactcccctaaatttccaggcaaaaggaaatgtttagtatttacaaaagacatgcattgataaaacttgattgttgctgctttcaaagcaaactagaaacttctagaaatttttaaattgaaagttttatagaggtaatggtagattcacatgcagttgtaagaaataattcagagatcgtatgtacctttctcactgtttgtctcggtggtgccattttgcacaagttatagaacaatatcagaaccaggatattggcatagacacaatctaccaatctcactcaaatttcctgatttacttctagttatttctgcacagtgtatttagttatatgtattttatcatgtttaagtttgtgtatccaccaccacagtcaagatactgaacagttcca

SEQ ID NO: 316 - DNA, 394 bp, Homo sapiens
cttcttactctcttcattgtccttcccttagtccaagctaccatcctctttcctgggctattgtaatagcctcttaactgctgtatcaacttctcagcttctattcactagtccatagtgcagccatagtcacatgtctaaaccctgtcagattataactttcttatgctcaaaacttccccagtggcttctaactgtactggggaagaaaatccaaagtccttatcatagcccaaaaggccccacatgatctgccccaactatgtctctgagctcatctcttgtcaccctcttattttataccactcttgcttgatttttgagggtgccaagcattatcctacttctaggcttttaaactggcagttctctgtctggaatactctttccctag

SEQ ID NO: 317 - DNA, 2417 bp, Homo sapiens
ctaacaaataaacatttaaataagttcaaaataaaacatcttactataaaacaaacgaacacattttgttttgtaagaatttaatgtgtaaataaatacagaaaaacaagcattacagcaaccagttttgctcatgatagcaattttaaagacacttcaacaaatacttttatgtaagaggctaattctgcaaaataacattcactttcctatggaataatttcacagtcccagattttaagccagaaaaatgagactcatgctggtaaagcaacctgcaaatcctgcttgttcttgcaactagtatactttaacattgtaaaaggatctttcaaagggggaaagaaggctcttaacggtacctcccagagtaaatccttgccccaaggggctgccctgctatctgcaagactaaaatggtcatgacaaattcaaagctaaaaaaagaaataacctttatcttcagtgtatttgcctggttcaagtggttatctgcagatttataagtaggtaaatagaacaatattgataagatttctgaaaactaaattgtatttggctctggtactaaggagttgagagaataaaacacctatgttaattatcaaccgcaaatgacaactttttgtgaggtttctattctaaggcttactttattcgtgtattccatttagaatcttaaaattttttgacaacttcctttaaacaagaagtaattcacaaatggttaacacagcactaaactaataagataggtcctcacacccatcttgaattatttaagaaagtattgccattgaaacatctttttcctgagaaattcatattgcagaatggcacaagacaatacacattttctccaattttctgcatgaatacaagataggaaaatcagattacaatatattttgtgaggaaaacatgtttcttaaaattgtgctttcagttactctccaaactacaaatttttagagggtgagagccaaatgtaagttaagaagtgatctttaaggcaagagaatgaatacatatggtaaattttggttggtgtttaaacaatttttataggaaattgtttacgagtggagaaactaaggcacagaaacaaccaagctcaggttcaaggttgagtttaatagtataggtagaaatagaatctagggatctgattctcatattagaggataatatctccccaaaggggaaaaataaaattatttcttttggtagataacattgataaatcatttttgaaatatataatatgaatttccttgaaaatctttggcatttctgagagtctttgtaggctgaggtttttaggtattttttcccaaaaaatatataaagttaggggagctagctttaaagttaaacaacaaaaatattaatattaatttcaaaatgacctgagttcattttgcatttttatataaatcaattgtacacttgagtactctgaaacataaaaggccaccacacttcacttcatagagttcacacacatgcattctacatatttatatgaccagaacttatttcacatttacataaagtataaaataaaatgtcttagtcaaatttttcataagcccaactatttgaagatgtcagttattacagtgggatgattaattcatatacagtattaagtctcaaattcaagtattataatattcaccccatgtgaaagtttctttgtactggctaagatgtgagctgtgaaatttatattgctcagtttggtatttttccctatgtgtatgttttccatcacaaaacctctgtctcacaattctgtacttgtaagagctcaggtaggtttatgtagtcataatgcagtagtctagaacacaccatgtaaaggtaaaaaataaaattattttcaagtttctttgtttttaaagtgctccacgtgctgtattatatcaactttcaggttatagaaatccattatgactagcaatagttttacaaaagatcagcagttaagcaagaatgatttgttcaagtatgtatacatagattaagagagcaaaaattctttaggcacattcatattcaaatcatacaaaaaaacccatgagagtacataagagagatggcagaggtgtttagaaggaatgtcagagtgtcagggaataatttttaaggtaactagtatgtaaactcaaagtggttttgaatattttggtaacaactatttgtccaaaacaacagaaacaagtacttattccttatcagaaataaaatacaaatcaagtctgtccaaatgttcagaagctgcatcataaaaatattttttgaaaaatttcatgcctaataggttgcctcatccatgttgtcatcactgtctgcgccaaaatcatctccatcttcaaagtatgaattaatgtagtcattttcctaagtgaaat

SEQ ID NO: 318 - DNA, 1981 bp, Homo sapiens
aacaaacatttaaataagttcaaaataaaacatcttactataaaacaaacgaacacatttggtttggtaagaatttaatgtgtaaataaatacagaaaaacaagcattacagcaaccagtttggctcatgatagcaattttaaagacacttcaacaaatacttttatgtaagaggctaattctgcaaaataacattcactttcctatggaataatttcacagtcccagattttaagccagaaaaatgagactcatgctggtaaagcaacctgcaaatcctgcttgttcttgcaactagtatactttaacattgtaaaaggatctttcaaagggggaaagaaggctcttaacggtacctcccagagtaaatccttgccccaaggggctgccctgctatctgcaagactaaaatggtcatgacaaattcaaagctaaaaaaagaaataacctttatcttcagtgtatttgcctggttcaagtggttatccgcagatttataagtaggtaaatagaacaatattgataagatttctgaaaactaaattgtatttggctctggtactaaggagttgagagaataaaacacctatgttaattatcaaccgcaaatgacaactttttgtgaggtttctattctaaggcttactttattcgtgtattccatttagaatcttaaaattttttgacaacttcctttaaacaagaagtaattcacaaatggttaacacagcactaaactaataagataggtcctcacacccatcttgaattatttaagaaagtattgccattgaaacatctttttcctgagaaattcatattgcagaatggcacaagacaatacacattttctccaattttctgcatgaatacaagataggaaaatcagattacaatatattttgtgaggaaaacatgtttcttaaaattgtgctttcagttactctccaaactacaaatttttagagggtgagagccaaatgtaagttaagaagtgatctttaaggcaagagaatgaatacatatggtaaattttggttggtgtttaaacaatttttataggaaattgtttacgagtggagaaactaaggcacagaaacaaccaagctcaggttcaaggttgagtttaatagtataggtagaaatagaatctagggatctgattctcatattagaggataatatctccccaaaggggaaaaataaaattatttcttttggtagataacattgataaatcatttttgaaatatataatatgaatttccttgaaaatctttggcatttctgagagtctttgtaggctgaggtttttaggtattttttcccaaaaaatatataaagttaggggagctagctttaaagttaaacaacaaaaatattaatattaatttcaaaatgacctgagttcattttgcatttttatataaatcaattgtacacttgagtactctgaaacataaaaggccaccacacttcacttcatagagttcacacacatgcattctacatatttatatgaccagaacttatttcacatttacataaagtataaaataaaatgtcttagtcaaatttttcataagcccaactatttgaagatgtcagttattacagtgggatgattaattcatatacagtattaagtctcaaattcaagtattataatattcaccccatgtgaaagtttctttgtactggctaagatgtgagctgtgaaatttatattgctcagtttggtatttttccctatgtgtatgttttccatcacaaaacctctgtctcacaattctgtacttgtaagagctcaggtaggtttatgtagtcataatgcagtagtctagaacacaccatgtaaaggtaaaaaataaaattattttcaagtttctttgtttttaaagtgctccacgtgctgtattatatcaactttcaggttatagaaatccattatgcactagcaatagttttacaaaagatcagc

SEQ ID NO: 319 - DNA, 225 bp, Homo sapiens
cttttttttttttctttgagacgcagtctcactcttgtcacccaggctggagtgcagtggcgcgatctcggctcactgaaagctctgcctccctggttcacgccattctcctgcctcagcctcccgagtagccgggactacaggcgcctgccaccacgcccggctaattttttgtatttttagtagagacggggtttcaccgtgttagccaggatggtcttgatc

SEQ ID NO: 320 - DNA, 3115 bp, Homo sapiens
gcttcaaaggcagaatttagagagattgaggatgcttttgtttttaacaaaagggtttcacactttgaaaattttttgagcaactagttgttgatgttgagagcagttgatccataaatctggtgtgtgaatgtttcaagcagaaattaatttaaatgtgtgtttaggaagtacttaacttggaagatgtatcatttttcttaaaatgcatgtttaaattttatttttttaagtaatttttaaaaagtttattaatgttaaatttatgatgcagaatgatagcatcagatgtctgcagctgaaaaaaatttactactatgaacccccaaaatattcagttgcaagaaaatttgattctaaaattattcatggtaggatacgtaacacaccccttcaaaacttttaaaaaatacatttagcacatgtgctatgaaagcatacgtacaaagagaaaggggaaagtgatttataattcctacaacagaggccaagaaatagattaaaatattttcaagaccccaaaataatgtattatggttgggaagtcagtagaacactggaataggtgaagacctgacagtaatttttgtcttaagaatgctttctttaggacagaccctttaacctcacctctgtgcatctgtttttaaaatgattatatttgcctctgatatttgaaagcacttttgtagttttgatgatgaaaaatatattaaacgtgcatattaccattatttaggaaataattccttatatactgtgataaatcattgctgttacatacagtaacatgccttaattacatttaatgccttactgctttatgtaagtaaatccaagtttcagaattaaaaataagcattatttcatatggtccaatcagattcgttacataggctatataaatttgtctccattttcaccatcaagcacaaataattgggtcaaaactgcctttgaggtctgttgaagaaaatggttcattaagcaaaaaagagtagaggtattttatattagcagtaacagacaaattatttagtaatcccttaacctctgtttttcaaagagaaaatatccaatttagacttttttcctgatctctatatatagcatcaagttgggaaacaaaggccaaaggtgtatagattgcttgaaagggggtggtagtgcctctttttaagatctgttgagtcggctacagtctggctaagtaagaagcatttgcatactgattccatcatttaatctttaaaagtatgtgttttaaaaatgtaaccagaatgattcttcaatagaaatgagatttggtggagtctggattgcctgttttgtatataatatatacttaagatatataataccacctcattttctgggcattatttcctaattgttgatgtttcaggcttttgataagtcattttatatatttcaaatttaactcagaataagtaaatatttatggcaaatgcagttttatgtactttcaggagaagaccatcaggaaaagacaggacaaagaagtcaaacattaaagcccttgcaaatattagaggaccttagacaattaccaaaaagtgtttaatagggaagttgcaaatgattctcttagtaaattaaacatttaaaaagtagttttaatgtgccttgggcatcttgaaaagaagagtgtgatataatttatgcttagtgttaactggtcattttacattgtatttattaagtctgctgaaaaatgaggttttaaggaagaaaatgcagattattttagggtaaacaggccaggtgtcctttgaagaactttgtttacatcaaattgatgaaattacagtgattccttactttttttgctagttgtactttgaaattgttatgggttcgatttccaaaatatgtaacttattttttaaaggaataaggtgtgctgtgtatttgttgattaaaaatcatttgtcttgcagagtatccttttttgaaggaaatatacatccttataacacatcaggtagttttcttttttctgtatttaaattatatatttgaattaattgaatataatttgagttacatataattctatataaaggttacatattgaattatggttctaatctgtttaggaaagaaatgaattttctaagcatttaatacatttggaataattttagtttctaaaaagtactaatgtaagttaagtttatatcaaatgcaaattaccttgtataactaacaagcacagttattgtttaacattatggattttaattgtgttgacacccttctttgaatttgttgctttacatgtgtgtctgtgtgtgtgtctgcatgtgtgcacgcatgtacttgtatgcaatgtaaaagtaacagcagaatcattgcatttggtttacttaaaattttggagttagcaagtaaacaaaaagctgatagttttatgaagtctcggttaaaataaaatttctttgctatctcactcctaggaagttatggagttcatattttcaaaagatatgttaaaaatggttacacactctgctggccacattaaaaattagaagactcatgttaaattatctcctccaaaggactttttatttacagcttttcttttcctggactctacctgcttggttcagtgtcctgaagagttatttaaatgaaccactacttagtaattagttcttttttaaagtatctacttctaaaattacctagttgaaaatatgaaggatatgcttagttttagaaatatcatgaagcaaggatctagtcagtgttacagggtaaaggtggagttttttaaagtctgtatttaaatggtgcactgatggattcatttttaatttgcattacaaaaatgttgctcaggtaatcagtattttcttccacgtatgtgcatattgcactgttagatcatagaaatatctgaatgctttaatttttatgtatgcaaaatctataaatcttttgtataatgtattttatacaaatgtaactgtagaacattgttagcatgtgtatctgtaaaaccagtttttaaaattttttgccccttatttttcatattttgaaagatctccaacatgtaataaagtttctcttattcaatctaaaa

SEQ ID NO: 321 - DNA, 16552 bp, Homo sapiens
aggccttgtccctgccttgtggagctcatgggtgcctctctggggagaaagaagctaactcttcacccggtggccacagccaatgcgagtctcttcaccatctgctgctggtgtgcagtaatgggggggagggcacaagctgatagatttaactcctgcagttgtattttcctgctctttgttttatttttgagacagggtcttgctctgtcacccaggctggagtgcagtggcacagtcatagctcactgcagcctcaaactcctgagctcaagcaatcctccagtctcagcctcccaagtagctgggactacagccataagccaccacacctggataatttttattgtagagttgaggtgttgctgtgttgcccatgcggtctggaactcctgggctcaagcggtcctcccaccctggcctcccgaagccgctgggattacaggcgtgagccattgtagcaggccttttctccctgctccttatgatgcttccatgcctttctgttctgcagcacagacataccacacacacaccacatacacacacaccacagagacgtacaccacacatagacacatactacaaacactgcacacagacacccacacatgcacatgtgtgtgcacacacacacaccaccacacctacacaaataccacatagacacacaccccaccacacctacacacacaccaaatacagacacacacaccccaccacacctgcacacacattacacaccatacacagacaccccaacacacctacacacacaccacacagacacaaacacactcttacaccccaccacacctacacacgcaacatatacagacacacaccccaccacacctacacacacaccaaatacagacacacataccccaccacacctgcacacattacacaccacacacagacacacctcaacacacctatacacacaccacacacagatacacacacactcatacccccaccacacccacacacacactacagactcacacacacaccacatacacacaccccacacacaggctcatatacccaccacacctacacacacacccccatcacacctacacacacacctacacacatacacagacacatacaccccacaccacactacaactacacacacaccacacagacacacacacacccaccacacctacacacacacacatcccaccatgccaacacaccacacacagacacatgcacatgtgagtgtatgcgtgcacacaccccaccacacctacaaataccacaccacacctacacacaaagccttcataaaaataagagccgggccgggcgtggtggctcacacctgtaattccagcactttgggaggccgaggcgggcggatcacctgaggttggcagttcaagaccagcctgatcaacatggagaaaccccgtctctactaaaaatacaaaattggccaggcatggtggcgcatgcctgtaatcccagctactcgggaggctgaggcaggagaatggcatgaactcgggaggcggagcttgcagtgagccgagattgtgccactgcactccagcctgggtgacagagcgagactccgtctcaaaaaaattaaaaaaaaaaaaataagagagccaggtgagaaccccttctccctcgcataactggctgaggagagtcagacacacaggctgctcttctgggcgtccctggaggccgactacaccatcatgcatggcagctggggaggggggcctctgcggggagggtgttctatgggtctcaagggaacacagggcactgagtgattctggatgggcttctgacctggggacaatttaaacagcattacaaccgacattttggttttcttggggattttataggccaggtacaaagcagaaagtgcatagaagatgtgatccactttgcctgggaagagaagctctttctcctggctgatgaggtaagaatgtccccactcagagggagtgggcactagctttctcttctagagggagggacccagcccccattgttctgcagccagagagaactgtcttggtgttggaggaatgattctggcctagggtgaggatatttagttttacaacttgtgggactgtgacttaatttacccctttattggtttgtactcttggttgtaaatttcagaaattcagcccaaatcacttaagctccaaaagaaaaaggaaaaagaaaaaatgccagtggggtcacaggtacgcagctggatccaggggcttggaccttatctttcaggtcctctttcccttttctacccctctgtgttggcctcatacacaggcctgttatcttttcagcctagagattcccagcctagaaagagggctttttgccctggtggttgcagcaagtctcagaattgagcttcattggttcagcctgagtcacacgcccattgctgaaccaatcactgtgatgtaggggttccagtatgcagattggccaggcccagagcatagggtgggccctctgctttcttctcccaaacctccagatagagaaccaaggagggttattccttgagggccaattgagggggctcctacccaacaaaggagggtgggttcccagtggcagaaatgactgacgcccactcctcataaagctgcagttctgtgcctcccagcgcttctgtatctactgtctcatttaattcgcttacatctcaggaagggatcttaacccggtacctgttgcttcttgaactccagttctggaaccagggtctgctcattctttttctgttttgtaagaaagaaactgaggttccagcaaatcctctttttatttcctcttcatttctgcatggtttccggcgagctgcagcttctagcccgctgccttcatttctttgctccttgtcacccccccacacatgccacacacataaatgcagacacacacacacgcatacacacacagacatacacacatatacatatgtacatacagacacacacagacacacgtacatagacacacacacatacatacacacacagcttacccatcaaattgttgccttaatagtagatgggcctgatatcttcatttctaaaggagagaaagggcagcagagagacccatgggtttcctcacaacctggtatacagaacttccttctgggtctgggaagaggaggacgaggaggacagggcctggcttggcaatggagccagcttgaccctccgactgatccccagggccccagaaaggctcagtttctctgatctccaaaatagatggggaattaacctcaaaggccagggtgggtgtctgccagctgtgagtgctggactcgggactggaaagaaccaaacgggtataaatgctgctctggcagggaaaagtgggtggaagaacacaatgattccactcgagtggggggttaagtgttgcaaaggaaacccaacagggttagctcttcaaataggaggtcagaggaaagggccactaatgccgtcgtcaccagtgttggtaaagcaaggaagcaccgtgctttaggaggagagtctgcttgggaggatgggggtctcagcaccatcactggtcagatggggtggaagggaagtctggggattgggtggggacgagtgtgagagaaatcaagtgagctcctgagctgtctcagcatccagcctgaggccttgcctccttgcttattccagaaagttccttcaggcacacttggctcatccctggaatggcacaggaggctgggccggctgggcctcatggcccacagcacctgtgccctcccttgccttggccacactgggcagcagcctctttgaggaccctttggtgaccgtccctgccgtgcccccgcaggtgtaccaggacaacgtgtactctccagattgcagattccactccttcaagaaggtgctgtacgagatggggcccgagtactccagcaacgtggagctcgcctccttccactccacctccaagggctacatgggcgagtacgtgggcctcccttccctctgccactgctgggcctgccagatcctcacgctgccggctcctctgccctgccccgtggtccacccacttggatggagagaaggctgcccttatctgttgcttctgctgcatctccccagtgggagagccgtggtgtgagaacagccctggtacaggggctcaaataagggcgtgctcagagaagcctgacaacggacaaatggagtggaaacaggactacatggcagcttgcgacacctggtgttttctctgtcacttgttccgaggttgactgatgtctgagaggtcagggagggcagatagagcagacaaacagatgctgttaggctgactggctgtgctctgggtgcagggctgccttaggcactgtgtgacctcagaggctaaagggtcagctgtaatcctgtgtctgttcattcagctaatgtttactgagcacttacgatgagtccggcactgatctcagcaccgcggatgccgcagcgaacaccctcctgccggcacaaagcgtgggttctagtgaggggggagagctgtaggcaaatgagtaaatcgtgcgtcccacggagaacagtcattaggagagaggtaggggtggggtcgaaggctgaagtggtgcagcctcactgaggagttggcttctgagttaaaccccgaaggagtgtggtggggaactgtgcagatatctgggggaagagcattgcaggcagcgggagcagcctgggcaaagaccctgtggtagcagcacacctgctgtgctggcagaacacacctgccatgttggcggaacagccaggagctggaaaggagggggcacgggggcagtggcaggagtggagacctgagaattataggaggccaggtcacctggtccactttgctgattgtatttttcacttgtgttcagcatgagataggagctgttggagggggtgtggccttgcttagctggtgtgttgctccttctggctgctgtgtgatgggggatggggacagaggccaggaggctgttacagtctcccaggtgagatatcgtgcaccagacagagatggggagaggatcctggatgtatttgaaggtggagttgataggaattgtgagtggaaaagacaggtgtgggagagaagagtcaaagatgaatcctggccaggtgcagtggctcacgcctgtgatccaagaactttgggaggccgaggtgggaggatcactcgaggccaggagtttgagatcagcctggataatatagcaagaccccttctctacaaaaaaatgttttaaaactcagccaggtttggtggtgcgcgcttccagctactcaggaggctgagatgggaggatcgcttaagcccaggagttccaggctgcggtgagctgatgacgccactgcatgatgaatctttagttgttcaaacaacaggaaggatggtgttgcagtcaacagatgaggaaggctgagggtgaagcaggtttaaggggaaagagcaggagtttggttttggacctgttaaactgaaacatgccagcttggcgtccaggtggagagagatgtgtaagtctccaggcaggctgacctctggtgggtggtttaagtttgggagatgtccgggtgtgaattgtaagattgttggagctctaagcctggacacatctcatacgtacatggagtgaggcctgggcctgggcccccactgctaggaggttaggggaaagaggaggaagccacagagactgaggagagaccagtgggtttgcagcaaagggcatgtgttcccaacgtggtggggtcctattctgtgccaggtgtcggcatggggagggctcttggttgttaggctggaacagtgtaagcgtgaagctcaaaggaatacttccgccaggtcaagggagcagtccccttgggatggctgccaaactgttcttgggcttctttgatctgggcgcaggctaacaggctggtctttctggtctaccctgtagcagttctggctccttgcttgacttccttttgctctgtagctcttttcctaaacaaatctgttctcggtgaactcagttttcaaactcaagcatgtttaccacacacttatccattgccccatctcagttattgattacactaccagtcagtgccctgatgttgggatcctgagtcgtgcccggtgttctcagatctggatgaattagggtctgactgctttactcattttgattctctgctcatcagcaaaggattaagcagaaagttctttctttccatttttgttaccagacacttttctgagatgttagaatttatcttcccaccttgaaacgtccagtccagggatcagatgggaatctttgccagttccgttcagcagtgtgatcccaaaagcatggtttttttgatttttgttttgttgttttgagatgtaatctcgctctggagcccaggctggagtgcagaggcgcgatcttagttcactgcaacctctgcctcccggtcttggttcaagcaattctcctgcctcagcctcccaagtagctaggattacaggcatgcaccaccatgccaagctaatttttgtgtttttagtagagacgggtttcaccatgttggccaggctagtcttgaactcctgacctcaagtgatccgtccacctcggcctcccaaagtgctgtgattacaggactgagccacttcacccggctcccccaaaagcatgttactaagcatctcattgtgtcaggtgctctgaggctgggggtgggggatgcatggaggaaggtgaccaggttcctgcctccaggcacctgcgttcctgtggtcgttagtgtgaacgtttgcagccacacaccagagaaggagatgtatgttgctgatttggtctggaaagatttttttttaaaactcatcatgtgtcctcagcttattttcatatgatttgatttataatttggctataaattacagaacttggcacggtgactcacgcctgtaatcccagcactttgggaagctgaggtgggaggatcgcttgaggccaggagttcaagaccagactgggcaacatagcaaaaccctatctctacatacataaaaagtgaaaaaaattagccaggcgtggtggcacacacctaaaggtccacctacacacaggtgtggcacacacctacagtcccagctatttgtgaggctgaagtgggactattgcttgagcctaggtggttgaggctgcagtgagctatgatcatgccactgcactccagcctgggtgacagaaaaagatcctgtctcttagaaaaaaataggagtttgtacacaatcatcactgttgttcaccttccattggcaagaactcagccacacctggccatttggtgttgggtgtgggaatgctttcgattctggctgtccaaatggcactttgttgaggtctttctataactggtggtcctctccctctctttggccctccaggtgtggttacagaggaggctacatggaggtgatcaacctgcaccctgagatcaagggccagctggtgaagctgctgtcggtgcgcctgtgccccccagtgtctgggcaggccgccatggacattgtcgtgaaccccccggtggcaggagaggagtcctttgagcaattcagccgagtgagtccactgtgatgcgtctgcacccctgtggccggggtcacgagagttcctgctgggccagtggccagcctgtctccaggtggccagacagcagcctcctgagggtgtggcctgcaggtgcactcatggctcttcagagcctgaaccacccctatgagttgaagtctggaagcgcagctgggcattgtttggaagtaggaggactgtgagtgtgtgtgggcaggtgaacccttcctcttcctcatggcgagtgtcgaagagggaagggagctgtgtcctgataacacactggggggactcatgaaactgaaaagaagacgaggaggtagaggggcgcagcatcgatcccaggcccccacccgcctctgccaacctgtgtcctcacagcttgacagggtcctccagctctgacagctttgaccagttcaaacaaaggaatttatgggtcaagtaatctagaagtcagctcccaactggtccaggctcacttcttttttaaaaaattgtggtaaaatacacataaagtcgacctttttaacctttataaagtgctcggttttctggcattcaggacattcacaatgttgtgcggccatcactgccatccatctccagagccgttccatgatcccacactgagctctacctgttacccactaacaccctaccctgccctccccttagccccagcagccacccttctacccccttctctctgcactcacctcctcgagattcctcatataaatggagtcatgttggccgggcgtagcggctcatgcctgtaatccaagcactttgggaggttgtggcaggcggatcacctgaggtcaggagtttgagaccagcccggccaacatggtcaaacctcatctctactaaaaatacaaaaatcagccgggatggtacatgcctgttatcccaactactcgggaggctgaggcaggagaatcacttgaacccaggaggcggaggttgcagtgggctgagattgcgccatggcactccagcctggatgacagagcaagactccgtttaaaaacaaaaaaagtagagtcatgtcttatttgtctttttgtgactggcttattttccttatcatgatgtcctccaggtccatctgtgttgtggcccgtgtcgtgattccaggctgaaccatgctccccacgtggacaggccacatagtgcttatgcctccatctgcagcccacaccttccacgccacttggccggcggcacctgtggaagccctggacggtgactgtgctccagccgtggacatacgcccagctcaggcccagtcactgaccttgacttgctctgcctgggtcctgtgctgcatgcacaccacacagacagagggtggggcgcgctggtcccccccagatgcattggtggggcccatctgcagaagaatgggcatgtgtcctagaagcatgttctgaggaattccgtccagagccaagtccatacagactgacaggcaacaactggtttttctcattttctggaaagacatcctggtacgagaatagaacccatgacacaggctgctgggctctaccctttggcctagaactccctggtgtctgtgtgccccacaccccagggcacgtggcagcctcccagggtgagcgctgtggaagaatttgtgccgggagatgtgttccacccacctccctgttttgctgtgctcaggctcacacaagctcttctttggtcagtctgtctgataccccagtgtcgaaggaacagaccaccccacccactccgtctgtgtggtgtgcatggggcatgtgacccaggcagagcaaatctgagtcaacgcatgggtcagaggggacatgtgttcaaagctggagcaaagtcatcatctgggatttccgcaagtgctgcaggaaagatcagtggctggagtgaatctttatccagagatactgactgctgtgctgtttccatctctcatcaggagaaggagtcggtcctgggtaatctggccaaaaaagcaaagctgacggaagacctgtttaaccaagtcccaggaattcactgcaaccccttgcagggggccatgtacgccttccctcggatcttcattcctgccaaagctgtggaggctgctcaggtctggggcatgggctgggctggctctctcttaccaggttcacctgagatgctgggttgggggcccctgcttatcttggggagcagaagtgctggccctggaggctcggaactgtatgcacctctcggccagagggtgttgaccgtgtaaagatgacaggttcttggaggcccagctgtgtgctgtgttgatgggcaaacatgaggtgggccccaggggaaaggagctgatctggactctgtgaatgctgctgctcccaagggcggtgcccaggtgagatgcctgcgggggaagcagcaggagctaccacctccacccagccactgcattctggagcagcgcttcccaaacttcagtgtgtgcaccgatcacctagggcctttttttttttcctttttgtggagaacgggtctcgctagattgcccaggcaggtctcaaactcctgggctcaagccatcctcctgcctctgcctccctaagagttgggattaccggcttgagccactgtgcctggcttgtttgttttgttttaattacatttttatagagagagatggggtcttactttgttgcccgggctggttgcaaactcctgggcctcaagggaacctcccatttcagcctcccaaagtgctggaattgcaggcgtgagccactgcctggcttgtttttttgttttttgttttttttttctgagacggagtcttgctctgtcgcccaggctggagtgcagtggtgcgatcgtggctcactgcaagctcggcctcccgggttcgctccattctcctgcctcagcctcccaagtagctgggactataggcacctgccataacacccggataattttttgtatttttagtagagacggggtttcaccgtgttagccaggatggtgtcgatctcctgaccttgtgatctgcccacctcggcctcctgagtaccttgttaaacacccaagtctaggccccatcctagacctacagaatcagaattcctagtgttaggctgggtgcagtggctcacacctgtggtctcagcactttgggaggctgaagtgggaggatcatttgagcccaggagttcgagaccagcctgggcaacatagtgaaaccctctctacaaaaaatttaaaacttagctgggtggtgcatgcctgtggtcccagctccttgggatgctgaggtgggaggatcgcctgagcctgggaggttgcggctacagtgagctgtgatcatgctactgcactccagcctgggcgagagcaagatctcttctcttaaataaatttaaaaaaaaagaatccctgggccaggtgtggtggctcatgcctgtaatcacttttgggagcccaaggtaggtggatcacctgagatcaggagttcaagaccagcttggccaacacggtgaaacccccatctctaaaaatataaaaaaaattagctggacatggtggcctgcagtgtaatcccagctactctggaggctgaggcagggagaatcgcttaaacccgggagctggaggttgtagtgagccgagatcacgccattgcactccatcctgggcgacagagtgagactctgtctcaaaaaaaaaaaaaaaaaaaaggaatccgtggtgtagtccgagcgcggtggctcacgcctgtaatcccagcattttgggaagctgaggcaggcagatcccttgaggtcaggagttcgagaccagcctggccaacatggcgaaaccccatctctactaaaaatacaaaaattagccaggtgtggtggcacatgcctgtaattccagttactcaggaggctgaggcaggagaattgcttgaacccaggaggcggaagtagtggtgagctgagatcataccactgcactccagcctgggtgacagagggagactctgttgcaaaaaaaaaaaaagaatccctgatgatagaacctgagaatctgtagttaagaggctccccgggtggtcatgcaaaccagtgtgtgggaagcagtgttgagagtgcctcagagaagctcgttccatgaaaattgtgtgcagaccccagggccccattttcagaggattatgcagcttgacctgcaggaagccactgctgatgcctgttgagtggctgcctggggatgggcactgcccgatgacgggcaggaggaccactacctacacctggctgtcctgcagtagttttcaggtgtctgtgcctggcaccagccaccagcagtatcccagcgtctggccctggtcctctaggagcggaaggggagaagggcactgccgtgggagagagacctgccatttagattacatttggctttgagggttgaatggtgtgtttgcaaagccaggaatgatcatgagctctgtctgctcccataggcccatcaaatggctccagacatgttctactgcatgaagctcctggaggagactggcatctgtgtcgtgcccggcagtggctttgggcagagggaaggcacttaccacttcaggtatgacttcctctccgcactaggggctggtccgggtcttgtccagggaaatgtggacttcttgacatggagcagaggactacttcaaagagagaggtgcggagaccctgtcctctctcgagtcacccctactctgtcctgctgcagacccaagctcagaccctgcccagggattaagaaaatctgggtggttgtctgctcagggttatattccctgaaaggtcttccttgactattctgtctctcccctctgccatcggtcccatcgctgtctgaaatgttcctagtagggtgttttcttattttgctgtccgttttcaactctgcgatggcagcacacagctgccagtgcctggagtggtgctggcatgtgcttagtagctcctggcagcaccctgggccatggcactgcctgtgatcccagagcctgccgaggaactgcaggggaatttgctccactcatgcccagggcataccccgttctggccctgcatggatgggaatgccggtgcccagagctgagctggctggagcagaggttttccactgaggccagttctcttcagaacaacatcttccccatacatgttgctctcagaggtctcctgcggcagatgctaaaaaaaagaaatggcatgagctgttagcacccggagccaagtcttgacttaggcaaggttgtgggttgtgtcccctgatggacaaaccttgtccggttggccttcccacccctggtcaggctcatctcggtggttgatggcttgatgagaaagtgatttaagcaagagggctgccaggaaggccagggagcattttggtgcaccagagggaggtgttagttactgtggcaacttggaaattcctttggagcagagttgtgactggagggtgtctcactgtcagactgactagagataaaaaaggcccctcaggtaggagtgaaatctctctctcaaactctaggaaagcccgagtcatactctagagaaagttctgatcagtggtcaaaatgttccagagggctgagtgcagtggctcacacgctttgggaggccaaattcaggatggcttgagtccaggagttcaagaccagcctgggcaacatagcaagaccctgtctctacaaaaaattgtttaaaaactagccagggatgttggcgcatgcccgtaatcctagctactcgggaggctgagatgggaggatcacctgagcccaagagtttgaggctgcagtgagctatgatcactctactgcattcaagctggggcagcagagtgagaccctatctccaaaaaaaaaaatatggccaggtgcagtggctcatgcctgtaatcccagcactttgggaggccaaggtgagcagatcatgaggtcaggagttcgagaccagcctggtcaacatggtgaaaccccgtctcttctaaaaatacaaaaattagctgggcgtggtggcaggcatctgtaatcccagctactcgggaggctgaggcaggacaattgtttgaacctgggaggtggaggttgcagtgatcgcgcaattgcactccagcctgggcaacaagagcaaaattccatctcaaaaaaaaaaaaaaaagtgatgcaggccttctgcagtaatgggtggatatgtcttagcctaaatgctgctccagtttattgcttttgttcacgtgtattacttgggtgaaaaaaccaacatgtgaatgaaggggaaagtggtccaagtgctgggtgctgtccgggctggagctgtcgaagcagaccaggcagacctccctcttccattcctagaggcagtttagctgctggattcgttcctctcccatcttgcagagcagccaggctgacactgttgtctctcctgccaggatgactatcctccctccagtggagaagctgaaaacggtgctgcagaaggtgaaagacttccacatcaacttcctggagaagtacgcgtgaggacgcctgagccccagcgggagacctgtccttggctcttcctcccaatgcccgtcaggctgaactcgcctcccccgtgactctgcctcgggcctcgcagaggccgctggtcacttcgtcatcattttgcccctggagacgtctttctttgtgccttgatgttgagagcgcctctcttttgagcaaacaagcattctatatgcaaccagagtagaggggacctgctcagcaggtgtgaccagggttctctgaatctgttattgtttttgcttctggaaagttcatttggggtttacaacaactaggatgtgttgggtgagatgtttcagatctggagaaatgagcaggtgtcgggaaatgtgtgacttaaccgtggtgagggctggaaatccaaactcaccaccatgatctgtgaaataaagcccttagcggtgtgaagcatccggtcctttgaacagaagggcctggaaggcccctggggctgagaaagggtccgcccggtggcctggaggcaggcgccgggagcgcagtagcacgtggactgggcaggatgttgcactagcttggggtagatgctgggggctgcggccacggtcagagggccccactgtgaggcgtgggtgtgagccaggctgcaggaggaactgggcctccgcttcccagcaacgcagccaggcctgagaattctgtgcgcccggcgggctttgggaatgaggggttcccttgaacatgcgtaggctggaaccccgtctgagaggtctccctgaatttcagtgacacatagtgcagcccggcagtgtcccacttccgtggagagagccgctggaatggtgtggacccatcccgcgggtgaccggtgcctgttctcccctgaccgagcctgtgagcacatcgccccctgctggcgacagcggggaaatgagggctgaaaatatcctccccacaagggcaatccccgggacctgccgagcagccaaggccctgtcctttcttgaatggtggcgagctgaatctggtcggtttcctagcttttaggtggtaaaagtgcctggcagcttggctgccgtggaggagtcagtcgtggttggaggttcattgccgtgctttcatgcagagtgttttgccttcatgttagcttccggctcccctcccaggctgcagactctgacctgtggcatcaggcttctcccagtacaggagggtgccatcccccagcatgcggcttctctgccattagcagccctgggcgggccgaccacactcgaggctgcggtgctacgggcttagccctcgcctccctcactgggagcttccccatcctccctgccttccccagtgggaagttagggaagctcaggagcctgggaccccgcatgtcccaaaatgggattggagaagctggagagaaagcagaagaggccgaggagtgaggcagcagcctctatgctgtgatttccacaccgggtccgtgcagaggaaacagaaactcccaactgtccttacccaccgacatcacagcccctatgaagaaagtagccacaatctcaaataacaaaagggaatgttctaaaactttttcttccttaaaaaatggagaaaattgcacttgtgcttgctgtgtggtatataaaccaggattagtcccagggtcgtgaggtttctggtgaaaaggttaaatcgtagaagctagtatattttttatatttttgtaacaattgcttttttcatgggggaggcggggttagtatttatagtcctaacaagtccagtaattttttataaatcttcagattataaacagcccctaaaaactttacaacgtttacacagttttttaaaaagagactgtatacacttgatttgctttcaaaataaataaggtcagctagtctaggaggttaacgtcgggtaggaatgctgatcatgataggtttggttttctacagattctgttccggtgcctttcctatccaggcaccacctgagaaagttgtcatttgaggtcgcacttggaagttacatctgtgaagtttctgtcattcgtccagatctgtgtgtgtagcatgtgctgaggaagcacgtgctgggctgtgcctcagacagtgcatcaccgggcacccagaggcttgcctggctattcctgttctggtgtgtgtggagtgttggggaggaacagatgcagatcaacctgtggctgttttcccgtctaggttctcacaggtatctcctgacagaggtacttaacaatggctctgctggaaatttctataaataaaatgtccaaaatggtgactgcgttt

SEQ ID NO: 322 - DNA, 16552 bp, Homo sapiens; identical to SEQ ID NO: 321

SEQ ID NO: 323 - DNA, 150 bp, Homo sapiens
ggttcaagtgattctcctgcctcagcctcccaagtagctgggattacaggcatgctccaccatgcccagctagttttgtatttttagtagagacagggtttctccatgttggtcaggctggtctcgaactcctgacctcaggcgatctgc

SEQ ID NO: 324 - DNA, 150 bp, Homo sapiens; identical to SEQ ID NO: 323

SEQ ID NO: 325 - DNA, 2109 bp, Homo sapiens
agctcctgggctcaatgatcctcctcctcggcctactaaagtgctgggattataggcatgagccactgtgcccagccaatttcatgtttttgaaaaatttgtcaattgtggaataagtgggtaaaaatcctattacaacaaattgtaccaagtcttagactaactagaataggaccatttctgagccccaggaagggctgtcggaggtgctgccccacatccaggaggctctgtggtctgggccacaccttcaggaggatgtgcacctactgggagccccaggccatctctaatctcacactagattctcccacccacagatatgtggtctccctgatgaaggctggatttagtccttgttctcagcgaggtgggtattggccccacaatggccacagtacactgaccccgtaacagaggaaatctatagctcgtataattcattttcatggcaagtggctgcatttgtttttggcctcacttggtctgcttcccagaatccctaagaagggaccaaactgccaaggtgggaggatcacttaagcccaggagtttgagaccagtgtaggcaacacagcaagacctcgtctctatatttatttaaaaataaaaaagccaggcgcggtggctcacacctgtaatccagcactttgggaggccgaggcaggcagatcacaaggtcaggagatcgagaccatcctggctaacatggtgaaaccccatctctactaaaaatcaaaaaattagccaggtgtggtggcgggcgcctatagtcccagttactcgggaggctgaggcaggagaatggcgtgaacctgggaggcggaggttgcagtgagccgagatcgcaccactgcgctccagcctaggtgaaagagcaagactccatctcaaaaaaagaaaaaaaaaaaaaaaaaaagtccaggcgcggtggcttatgcctgtaatcccagcactttgggaggccaaggcgggtggatcacctgaggtcaggagttcaagaccagcctggccaacatggtgaaatcccgtctctactaaaaatacaaaaattagctgggcatggtgttgcacgcctgtaatcccagctacttgggaggctgaggcaggaagacctcttgatcccaagagacagaggctacagtgagcagagattgtgccactgcactccagcctgggcaagcgagactccgtctcaaaaaaaaaaaaaatacaaaaattagctgagcttagtggcgcatgccagtaatcccagctactcaggaggctgaggcaggagaatcatttgaacctggaggatagaggttgcagtgagccaagatcacgccactgcactccagcctgggcgacagagtgagactgtctcaggaaaaaaaaaaaaaaaaaaaaaaaagaaggaaccaaaatgtagtgatcaaacccttccattttataactgggaaaactcaggcctcgtgacaaggcagaaagaccccaaatggtagaaaacagctgctgcaaccccttgtgctcttgtcctcactgaggggctgaagtagctcttagagctagaggggtgttagaggtaaccccgctccagaggactgactgtagcccaaggcaagagagggagtttcctgaggaaggacccagatggtgacctcagggtgggtgaaggaggtattctttgaatttctcttggagttgggagacttgatattgtccgacctaatctgcagtgctgaatcctgtcccacaactaagggggaccaattctcatgtccttgatcctctttgaagcaccttgggcttgtctgtcccacatcatcagtggcattaagcacaagagataccatcttagcacaatccttttactctaaatgttcaggggaggggtatagcagcaaggagagggggtctctgtgatggcccaaggaggtatttttgatactgaagacccaggcccccaggggaactgcaggaagcgtctagctcataggcataggcctttcagtaaaggtcacccatccagggatccaggatgtagctggttccaggtgatgaaatcttcccaccttatgactggggaatgtcaggtctagtagcaaagcaaagagaccccagatggca

SEQ ID NO: 326 - DNA, 2147 bp, Homo sapiens
ccccacacacacacacacacacacacacacacacacacacacacacacacacacacggactctccgaatcagggctgggcctctgtgccaggccatcccgtctttggagtgtatcctatttgagatcaagaaatagcctgctgtccttcccaccttccctgagcagcacctacagaacagcaaccgtgatggtgtgtgaaagcaacagtcagagactgctatacatttctgtgggtgggggtagggaatactggctctgtggccctcctcagagctgggaggccaagggttcactgggcttgaatcctctctaagcacctaccccattgtggcctaaacctcctcagtggaccacgggaaatcatgttggaccaagggtttccatgttcaaacagtcaacaaggccctcccctaggttgagatattttttatactgaaggcccaggccccccagtatggcttgctgccagcaagcagcaaggattctctcgtgggtaacgctgtagccaggcaggaccagcctcttctgggagacccctctccccacgtagggtttgtgtagtgctcccacatcctgcttattgcctgccacccctgcttctcgcctggacctcttggtattccgtgtacaccatccttgctgtttcttgcctctgtgccttcaacctgctgctcctggcctgggataccttttattttcttttatttcttcttcctttttttttttttttttttttttaacctacaactagctctcagttcaggcactgtctaaagccccaggctgggttaggtggtctaggataccaactccccctcaacattttaccttaatccaacagtacagtaattagccgaaacttgcctggtttttcctactagactgtaagccctctagggacagggacagtgtcttattcatctctgtgttcttagtgcagagcctggcccgctgttggtgtttaataaagtgtgttgatctgaaatgccccagaccaaccaagattcccagacttggcttcttcccacactgggctggagtcctcccggagctcagggggaggtgagggccccagaaggtgcacttgccatcaggcttctccctgggtcccaggaggactgcagccaggcccgaggcacctttgtgggaggtgggtagagggctgaggcagcgtcacaccttcttgccccgcctccccatctgccttccccaacccaattagaccagcgcagacataagccttccctgccagggcctgcagacttgctgatgtgttgatcctgcagccagaagcctattaaggctagaaatgagtgtgacggatgcaaatgctgtggtggccatacttagtgccccctttcccagagccgcttgtgctgagtctagctcattaacttgctgcaaacccctaaggggcaaagaagggccgggtaaggcagtggtgggctgccaggtgggtggccaggcaggatgagggtggcaggagcctgccacttcctcggtttggtgcgatccgccaggacggagaaaggagagggaaggtatggacccccacagtgccctatcaccccaataattgaggaaatggcacttcctagtatcggcagcatgccaggcactgctggatgtgtaagaccctatagttaacataacactgattatttccatcccaggctcagaaagatggatttggtccaggttgcagagccaggcttctgaactctctcctgtgccctgagcctcttgtcaggaggagctggagcctggggttgggccttgggctcgcattccggctccgcttgccatgtgacctcctgcctttagtttctactcatacatcgttaggcttcatagtggaggacactgaaaacccttagcaaactgtaaagttccagagaattaaccttccctgacccagtgagctgggtttgaagcaggaatgtcagagcatggcaggtgtggagaaacctcgaattcagccctgccctgcccgggcctcgccagagctccctctccagctcctcttgcctccctgccccaggatccccttcccggccttgggggtccaaggcggccttaaaagaaggactactttctccgaaggggacttgaagttgaggccgctcagcaactgcagaggtcgggc

SEQ ID NO: 327 - DNA, 32204 bp, Homo sapiens
cgccaagctgcgcgggcagaagcggtccggggcctccgcggcccccgcggcctccgcggccgctgccttggcacccagcgccacccgcacacggcgctccgctagccaggccgggagcaagagccaggcggtggagaagccgccgtcggagaagccgcggctgaggcgctcgtcgccgcgggcccaggaggagggcccgggggagccgccgccgcctgagctggcgttgctcccgccaccgccgccgccgccgccgactcccgcgaccccgacgtcctcggcgtccaacctggacctgggcgagcagcgggagcgctgggagacgttccagaagcggcagaagcttacctccgagggtgccgccaagctcctgctagacaccttgtgagtgcggcgggccggggggcgcgggagccgttgccacgcggaccccctcggcaggagtcgggctcgcagcccgcgtgcaggccttgggcgcctttcagctctgagccttccacgttacggagccgacgcggctcccccgttagcactggggttattccttaattctaagggcggcggggcggggcggtgcttctagggctgtgtggcctgggaatggaaagggggcttcgtccggagcttgagggcgcgcgcagccgtcttgggacacaaagagtctttcccggccataagcatcgtgctcggggacgttgtctcttgctggcgcgcaaagggtgtgggggcctttcttagtgaaaagaacataaatcccacggctttctcttacccgaatcccctttttttttgtgtttgcacacgtgtttttgagggtgggtggaagggaaaggtagaagcgttgaaggaagcatgaatagttttgaactcactgggaagcaaaatcccgtcattgttccaggcactgccagggagggagcagggggcggaggttattgatccgggagagaagcgcgcgcgaagagatgctccggcctcgcgcggcggcggggatacctacgtagggaggcttttatgtgctcagccagctaatgctccctgccgctcgccctcctggctgctccgcagtcttttagatggcccgaggagcatctcgagtgtccgcgatttgggaaagagcttttaactgggctgttaaagggctgccttcttttctccaaatgcgatctggattcctgcctcggggaacagttgtgctacagagagatattttaacgccctgatattatatttcagtgtcaattttacgaattaaaaagaacaatcaaaacactagggggaaaaaaccgacaagaataacctagcaattgcataacctgagaattacttcttttcttgaacatgttcctttgagcttcttgcggaagaaattctcttaggatgagtcgtccccgacagaagatacatatttggttttctgtgtgcttcactttttggtttttcatcttggactgcacactgaatttttaaaaaacgttcatccatcaaacatttgagcacctatagggtgacggctgcctctgggcagaaggaatacgaagatccttaggaatgtaaaactcatggtgtcttcaaggcatacagaaaaaaagaagaatgtaaaactcaaatttgagataaatttttattttaagacaaactgataaatggtcaagaaaaagttttaaaatattgacataaaaaagctgtttttctcccactagattgccatgactttgtacttataaagtctactaaattatattcaaaaagtgtgtataactgtaccattttcgttaaaatattgtgtagaaaaaagtttgggggaatatataacaaataattaactgtagatccctctgggtgtaaagattacaggaggctttcactttgagcactctcaaatagtgtgaagtttggagtttttacaataagcattatgtgtgcagaaaaaattaaaatacataaacgtaaagaaacatgaaaaaatgatcagtcttaatcatgcaaattaaaactgcagtgagctatttttcctataattattgcctgagactgtacagtgaaatgttttctcatttatttatcgggtaagggtgttcaatccttttggaaagcgattttaagacatttatcagatcttaatgttcatttctgagtttggcttatatataagctttaaagggttaaaattgtatgtaggctgggtgaggtggctcatgcctgtaatcccagcactttgggaggccgaggcgggtggatcacctgaggtggggagtttgagactgcctgaccaacatggagaaaccccgtctctactaaaaatacaaaattagctgggtgtggtggtgggcgcctgtaatcccagctactcgggaggctgaggcaggagaatcatttgaaccctggaggtggaggttgcggtgggctgaaatcgcgtcactgcactccagcctgggcaacaagaatgaaactccctctcaaaaaaaaaaaattctatgtaatgtgtattacaactatgtaaaacgcatgtgtatgaagaatactggaaagaaatagagcaaaaatataagagcctttattaagtttctcaaaaggctcttctggacctctggacttgattgagtacacagtcttatttttcatagcagcctgtacctcctttatcacaatcataattaattattatttgagtaaattgttaaggtcggtaagggtagcaatcgtgtctgctgtatcttgtttagtgttctctccttcgtgcctagctcataaaaatatttagtatttgaggcccggagcagtggctcacgcctgtaatcccagcactttgggagtccccgtgggtggatcacaaggtcaggagttcaagaccagcttggccaagatggtgaagccctatctctactaaaaatacaaaattagcagggcgcggtggcaggcgcctgtaatcccagctacttgggaggctaaggctggagaattgcttcaacccaggtggcagaggttgcagtgagccaagatcgtgccaccgtactccagcctgggcaatagactgagactccatctcaaaaaaaaaaaaaaaaatttagtatttgacatataaataaaaatgtctggtggtgggttaggatccctcacattttcgaaatgtttggaatgttttattttgcaacttaatataatttaagaaattggtgaaaagagagctcatggacaaagaaggtgctgaaaccattcttcacttaggaaattgacagtgcctccttaaaagcagaaatgcatctggttgtcatgtagaaaagacttttgtctaatcttctgtctttctttcagcaacaaaaagagagcaggaggcagctattcagaaattattatctttctgatttttgtttcatttagtgaataccagggcctggtgaagcacacaggaggctgccactgtggagcagttcgttttgaagtttgggcctcagcagacttgcatatatttgactgcaagtgagtatttttttttccctaaattggcttaaaagaatttcagagttaaaatgcaatatttcaaaataatctggggagttggggtacagaggaaacattggccttgggctggtaactgttgaagtcaggtgatggggacagaaaggttcattgttctatttttgttccttttatatggctcatcacagagcttcaacagcatggcccaggtgacacagagcagggtcctcagggcttgtggcttgtggcagcatcaccctcagactgacactgctgaggagccgggggcggttagctgcaggtgtgcctggctgggtactgagtggaaagccttgggcagaatcttcatagaagtctagagttggggagagttggagggtatgttagtaaagggtgtatacacctggaggctccccaggccctccactctcgctctgctcttcggttgaggcagatggcactgctggctgtggagggcctgatttgtaccaccttccccggcgttatgatggagcagggacgacaggctctggctttgggacccaaagttggcatgcagctaattatttaacagcatccagtcctttttgcccctaggtaccggaattatatatgaataataagcacatacgatggaattactcaaatggagaactgaccaggctactaacaatagagtccagattggaaaagaagcactgtggaataacttgtgagaggattctgtgctaaattagaactttttcaaaggtggcctgaaaagaggggacttcagtttaattccagagatggtaattctggggacgtgttttacttggagctggacttcttgtgacgtggtgatgaagaaagagggaaacctaaacttccttgtccatttttggtgtggatgtctcagagacatcaggttgtagcagtgtctgaaatttgtttcctaagtgtctctgaagtccagcgcttctcttcactgtaaagaactgaggggtgggcagtacagacctgtctgttggtcctgtgttctgagcattgcagaacctcgactgctgacttgggacccccctgggctctgctgtacctgcaaaccagaggcactgctatccaggcctttgccccagctcctcggccctggatggtgctgaaaggggcatcatctgtggggtcggctggctctcatggctgggccgctcaggcatagaggatgcaggtggctgctcacaatctggaatttgctctgtctttctgtagttgcagcatttgcaagaagaagcagaatagacacttcattgttccagcttctcgcttcaagctcctgaaggtcagtgcttaagagcagggtcaaggagtgcagaacccattggtgagatttacaggaccccccacccaactgttagcatgccgtctgtagcatgggaggggcctggagcatagcagggcctctcacgggctttggtttcaggttgacatttaaaaggtgggcccggcacagtggctcacgcctgtaatcccagcactttgggaggccaagatggatggatcacctgaagtcaggagttgaggaccagcctggccaacatggtgaaaccctatctctactaaaaatacaaaaattagctgggcgttgtagtgcatgcctgtaatcccagctacttgggaggccaaggcaggagaatcacttgaacctgggaggtggaggttgcagtgagccgagatcacaccattgcactccagcctgggtgacgagtgaaactccatctcaaaaaaaatgaaaataaaaaataaaaggttgtgttattttttacctttattttttggaggcctatttggtattgtggaaacattttcaaattcagagaatcaaaaaacaataaaatcacccaaatcctgtcaactaaaggtaaccactgttaatattttggtgtctgtctttgtgtattattttctactctgagaaatacatctaaacctattgtcttatgtttattaagtagaattttaccattctttttgttgataaactgcttatctcatttcccaatgaaaagcttatatacttatttgtaactttaattttattattttggggaattttttgtacttggtacaaaatttgaaaggtagaagaaaatgtgtatatacacagtgaaaaatctttccctactgtccccatgccccagtctccctcttccccacagccgatttcctggtctacttaccccatcactgtctctgcatcattgcagttgagtcccgtttttttctgattatcaacaacactggtgaacctccttggtatacatttttgacaatttagaaatttcttctttaggatcaattctcttagaaataagttctctggctattctgggcacacttcctacaccctgctctacaaggagcagttaaaaaaaaagagagaaagaaaatctccaggttaaagaatacagattttttaaaaaagacttttagcacattatgggtaatgtggggttgggcggggctttaattccatccagataatgctggatggcttgggaccacttggcagtccttcgctgcttttctgtgctgcagtggctatggagtgagcaaggctcctcagggagctatttctataggaagcacaattctggacggtatggctggggaagcgtaaagagggttaacaaggataagaaacctccaccccttccccttcagctgtctgatttctctccctaaaggtaagccactgtttcttggatccctcttcaaagatacatatgcatataaaagcacatacaggccaggcacagtagctcatgcctgtagtcccagcactttggaaggccaaggcaggcagatcacttgagcccaggagttcaacaccagcctggacaacatagcgagacccccatgtctacaaaaaataaaaaatcggctaggtgtggtgttgcatgcctatagtcccaggtactcgggaggctgaggtgggagaatcacttgatcctgggaggtcaaggctgcagtaagctgtcgtcataccactgcactccagcctggataacagagtgagatcttgtctcaaaaaaacaaaacaaaacaaaacaaaaacaccacacataccagtatatagccttaaaaaaaaaaaaagaaatggtagcataccacgtacgttgttttataccttgcttaactttttttttgagacagtctcactctgttgcccaggctggagtgcagtggtgtgatctcggctcactgtaacctccgcctcccaggctcaagtgattctcctgcttcagcctcctgagtagctgggactacaggtgcccgccaccacatctggctaatttttacatttttagtacagacagggtttcaccatgttggccaggctggtcttgaactcctgacctcaagtgatctgcccaccttggcctcccaaagtgctgggattacaggcgtgagccactgcgcctggcctataccttgctttactttgtaactttggcaattgttccatgttagttttgtagagctgtctcattcttctcaaaagttggagaatatttcattttatgagtgtccataatgcctaaccggtcctctattgagggacattttcaatttttccaatctttagccttcataaacagtgctatagtatctatatacctatgtcattgagacatttggaatatatctgtataataaatttcaagaaatggaattgtgtgctaaagcatatgtacactttaaaattttggtagatgttgctaaattgtaccaattcctgttcctgtgactgatatatgtgagcacatatttctctacatacttgtcaataccatgttaacggctttgattttgcccacctgacagtgaaatacatctcattgaagttcctttggtgagcatttcataggctaaagagtgatttatttttctttctatctgaactgtccgttcatgtcctttgtccagtctcccgtttgtattatccattaaggaaattagcctgtctatgacgtctggcaaatatttttttcctggtttgtcctttgtggataaattaagcacagccatcagttttcttaagaccttgagccgttctgtttggggacatggagagccagtcccttgggtgaactgtctctccacataggccctgggaagcaagcactttccctccctgatgtgatgtatcagggaaggctcaaggctgaattctgtatgccgttgacctaagggaagctgtgagctgtcacgctccagactgacatgtctctggatagtgtagatgggtctctgtcctcaagaaggtcccagtctcttctggagataggaaatggcctcttagtacaaagagccctacagaagagctcctgccattaagttatttcaagatttttttttttaatggtgcgatctcagcccactgcagcctctacttccccaggctcaactgatgctcctacctcagcctcccaggtagctgggactacagatgtgtgccactgcacctggctaatttttatatttttttgtagaaacagggttttgccatgttgcccaggttggtcttgaactcctgggctcaagcaatccgcctgcctcggcctcaaagtgttgggattacaggcatgagccaccatgcctggccaaaggtgttttttttttttttttttttgagacggagtctcgctctgttgcccaggctggagtgccgtggcatgatctcggctcactgcaagctcggccttccaggttcatgccattctcctgcctcagcctcccgagtagctgggactacaggcgcctgccaccacacccggctacaaaggtgtattttttaagtgacataaaaataaatgtctttggggccaggcgcagtggctcacacctgtaatcccagcactttgggaggccaaggtgggtgaatcatgaggtcaggagttcgagaccaacctggccaacatggtgaaaccctgtctgtactaaaaatacaaaaaattagctgggcatgggggcacgcgcctataatcccagctacttgggaggctgaggcaggaaaatctcttgaacccatgcaggtggaggttgcagtgagccaagattgcgccactgcactccagcctgagagacagtgggagactctgtctcaataaataaataaataaataaattaaataaataaatctctttgtaaaaaagaataccgtttgtctgttttcacctagggagctgagcacataacgacttacacgttcaatactcacaaagcccagcataccttctgtaagagatgtggcgttcagagcttctatactccacgatcaaaccccggaggcttcggtgagtaaaggggatggactgcaagctcagggggacacagagaggcccatggtgctctcatttaaagtcttatttggacaggtgggatgctgactagaccctgtcacatgcgtatcttagaggaacagggctcctcagcagagcgctttccacatgatagaatgtgagtcgggctccggtgaaacttttctgaatcccatatctgaatgtggtgaagttggacttggagcccatccaggttgtgattcttattcactggtgctggtagagctggtgttgctggggatggtgttgaagggtagggaggagaggggtgaggagatgggcttgtggggccaggggaggcagctttaataatgacaggggttaagggagtgaaggaggcaagattggggagcattgataatggcatttgaaagctttttggttgttcaaaaattaggcaggactggctggctgcggtggctcacacctgtatcccagcactttgggaggccaaggtgggaggatttcttgagctcaggagtttgagaccagcctgggaaacatagcaaaaccgtatctctgttctttttaaaaaataataaacaagcagggaaccctccaagccccgcttcagggcctgcttgggtctggggagtaataaaactaaccctctgacagttgttgagaatcataccaactatagtgtgaattgaaggggaaagcagaggtggaagatgttctgaggactcttgttgtgtcagtgcagcctccagagctgcgagagcagctatgactgtcagtgtcttttgccttatggtggtggggagcggacaggggaggtgggggaggcagggcagggcaggatgtcatccttaccgctcccccattgcttcagggcctcctgttcctcatctgtcacatggagactccttcctgtctaccttgcagaacaggaaagagttgaaaagtatgaaatcctgtgcaaatgggaagacatttaattcttagaaagttatctatctgaggccaggcatggtggctcacctgaggtcgggagttcgagaccagcctaaccaacatggagaaaccccatctttactaaaaatgcaaaattagccaggcttggtggcgcacgcctgtattcccagctacttgggaggctgaggcaggagaatcacttgaacccgtaaggcagaggttgcagtgagtcaagatcacgccattgtactccagcctgggcaacaagagctaaactccatctgaaaaaaaaggaaagaaagttatctatctaaacacaggaaaggcctgtgaattcttcaggctgccagtcagagattgctctgggctgtgcctttctgcatgttgtactctcaacttggtattgaatgttgtctagccttggccaaacctggctcagggagtgtgattcccatctggcagttgaggaaagtgagtcagagggctgaagcggtaggctggagccagtgctttccgagccagctggcagcctgtgggtctcatcactgaagccataagctgtggcatatcctttggaagccctaatgtgtagcgtgatgatgcctgcaggtgggggcttatccaggagccggtacaccatctggtctcacccatactgaggatccccctttgtctgtgccactttctcgtaggaattgccccccactgcctggatgagggcactgtgcggagtatggtcactgaggaattcaatggcagcgattgggagaaggccatgaaagagcacaagaccatcaagaacatgtctaaagagtgagcttctgcctctcctgccctgaaaaggaggaatgattggggccagcaactttgctctccctgccgtgcctcggtggtgctcctgaatgtggctgacctgggctgctggttccgttgactagggtcatcttgatctctgcagtttgctccagctaccagtttctttaggcagctctttgtcctccctctgcccagattttgatgtagtctaattgacatccttctcttcccaacttttgtgtgatcttttaggaaaaaaaataaatatttttaacattaaagcagtcactttggtttatcatttcttttgtactgtgatttgcttctgaggccagtcgattaatagcagatatatactcagcactatcaagatgtttgccaccaggcattgtggcttaagcctgtagttccagctactccggagggttgatcgagcccaggaggttgtggctgcagtgagctgtgttcgtgctactgcactccagcctgggtggcagaatgagactgtctcaaaaaaaaaataagaaaaaagaaaaaaatgtgtagctaaattggaaagaagacataagataaacaattattaaaaatggaagattgtggcagggcatggtggctcacacctgtaatcccagcactttgggaggctgaggcgggtggattacttgaggtcaggagttcaagaccagcctggccaatgtgttgagaccccgtctctactaaaattacaaaaattagctgggcatggtggcatgtgcctgtagtcccagctacttgtgaagctgaggcaggagaatcacttgaacccaggaggcagaggttgcagtgagtggagattgcaccactgcactccagcctgggtgatggagcgagactccatctacaaaaaaaaaaaaaaaggctgggcactgtggctcacgcctgtaattccagcactttgggaggccaaggcaggtggatcacctgagatcaggtgtttgagaccagcctggccaacatggtgaaaccctgtttctactaaaaatgcaaaaattagccaggcgtggtggcgggcgcctgtaatcccagctactcaggaggctgaggcaggataattgcttgaatccaggaggcagaggttgcagtgagccaagattgcgccactgcactccagcctggctgacagaaaaagactctgtctcaaaaaaaaaaaaaaaaaaaaaaattgtgaatggttacaatccatgtgagctgtaaagataataagagctctaagagttcaaaggagagaactcagggaagccttgaggagagtacgatttgagtctatctttaaaaagttaaatcagcttctaatttctttttcagttgtaaaatacacataaaatttaccataaactgttaatttatttagagacagaatctctctctttagttattttgagactgtcttgctcggtcacctaggctgcagtgcaatacatgaacatggctcactgtaaccttgacttagacttgagatctcccccctcttagcttctggagtagctgggactacaggtgtgtgccaccacatccggctaatattttttgtaaagacaaggtcactccatgttgccccggctggtctcaaactcctgggctcaagcagtcctcctgcctcggcctctcaaagtgttgtgattacaggcatgagccactgcacttggccttaaccatttttaagtgtacaattcagcagtgttaagtacattcacattgttgtgtagccatcattgccatccatctccagaactcttcaccttgcaaaactgaaactctgtacccatgaaacaacaactttgatcctatttttaaaggaagcaagatttcagctgggcatggtgtctcacgcctgtaatcccagcactttgggaggccgaggctggtggatggcctgagatctggagttcaagaccagcctggccaatgtggtgaaaccctgtctctactaaaaatacaaaaattagttgggcatggtggcgggcgcctgtaatcccagctactcgggaggctgaggcagaattgcttgaacccgggaggcagaggttgcagtgagccgagttcgtgccattgcactccagcctgggcaacaagagcaaaactccgtctcaatcaatcattcaatcaatcaatcaataaaggaagcaaggtttaaggagacaggagaagtaactgaacaggtacgcacacatgcaaaagccaggctgaagctgcatgtggtggtgcacacctgtagttgcagctacttaggaagctgagggccacatgagcccaggagttttgagactgcagtgagctatgatggtgtcatgcattccaccctgggagacacagcaagaccccatctcaaaaaaaaaaaaaaaaaaaaaaaattggctgaattggaggcttttaatgggaagaagtaatgaagatatcagaaaggtatgttgaggatagactggatggtcttggatattaggctcaggaatttggcctttattttgcaggcattgggaagctgtgaccacctctgaacaggatgaataaagcctggcctcatatagtcttctgattggttgccatctccctctcttcttaacttcacattgctccatattactaacatattagctttcctcaaacattcctgccattaccaaatactgagtacaaataatggcaaatgcttaataaatatttgctctttgctttagggaaattactcatgaaatgatttgtgaggtagactagacaaggaaaaagaacagggagagggaataaagatctcagaacaaaggtctctgaggaaaaaaaaaaaaaattaaaaaaaaatgccgagtgtggtggctcacacctgtaatcccagcactctgggaggccaagaccggtggatcacctgaggtcaggagttcaagaccagcctggccaacatggtgaaacctcgtctctactaaaaatacaaaaattagctgggcgtggtgttgggcatctgtaatcccagctactcaggaggctgaggcaggagaatggcttgagcccaggaggcagaggttgcagtaagctgagatgatgccactgcactccagcctggaagacagagtgagactctgtctcaaaaacaaaaaacaaacaaacaaaaaaaatacagatggccaggccaggcatggtggctcacacctgtaatacagcactatggaaggctgaggcaggaggattgcttaagccctagagttcaagaccagactgggcaatgtagtgagacccccccatctctacaggaaacaataaaatacaataaaaatggcagtttctcagtttgctgtgctgggttctatgtggtcactgtctcttcagaatcactgatggccaggttcactcttcaagactggaagcagcacgcacaaggatgggattttcgaggccagaactccaggtatttttaattttttttaattttaaaattatacaggggccaagcacggtggctcacacctgtaattccggtactttgggagaacatggcaaaaccctgtctctactaaaaatacaaaaaatcaggctgggcgcggtagctcatgcctgtaatcccagcactttgggaggccaaggcaggtggatcacctgagatcaggagtctgagcccagcctggccaacgtggcgaaaccccatctctactaaaaatacaaaaattagccgggcatggttgtgtacacctttaatcccagctactaaggaggctgaggcaagagaattgcttgaacctgggaagcggtggttgcagtaagtcaagattgtgtgccattgcaatccagcctgggtgacagcaagactccgtctcaaaaaataaataaataaataaataaataagtaaataaaaagtaaaaaaaattagctgggtgtgttggtgctcacctgtagtcccagttactcaggaggctgaggtgggaggatcacctgagcccgggaagttgaggctgcagtgagctgtgatcgcaccattgcactacagcctgggtgacagagcaagactccgtcttaaaaaaaaaattattttttttagggatatgtgatcacagctcactgtaaccttgaactccttacttcaagcagtcctaccacagcctacaggtgtgtgccaccccctggctaattttttaaaattttttgtagagatggggtcatgctatgttgcccaggctgctctcaaactcctggcctcaagtgagcctcctgccttggcctccctaagtgctgggattataggtgggagccactgcattcggttgcatttctttatttaattacatcttgatcttttcatatcaatatacatatcctcattattaactgttgcatagaacagcatagtgtgggtgtagtttatttagctattctttttttcacggaaattatgattgtttacagttttttgctattaccaagagtgttgacagtgaacattcttgtacacacctctttatacatacatatgtgtattatttgagaatagagaagtgggattgctgagctgaaagatatgcatttgtttttttgggtttttttttttttttttgagatggagtttcgctcttgttgcccaggctggagtaaaatggcgtgacttggctcactgaaacctctgcctccctagttcaagcaattctcctgcctcagcctcccaagtagctgggattacaagcacccaccaccacgcccagctaatttttttgtatttttggtagagacggggttttactacgttggccaggctggtctccaactcctgaactcatgatccacccacctcggcctctcaaagtgctgggactacaggcatgagccaccacacctggctgagttttaatttttgatggagtcaaattcattagtctttttttttttttttcttttgtcttagtggctctctgacttgggttttctgggttttttgtgatttatttatttcttttttcttcttcttcttcttctttttttttttttttttttttttgagatggagtcggtctctgttgcccaggctggagggcaatggcatgatctcggctcattgcaacctctgcctcccgggttcaaacgattctcctgcctcagcctcctgagtagctgtgattacaggcgtgcgccaccacgcccagctaatttttgtatttttagtagaaacagggtttcaccatgttggtcaggctggtcttgaattcctgaccttgcgatccgcccgccttggcctcccaaagtgctgggattacaggcgtgagccaccgcagccggctgtgatttatttcttttttgagaatatctttctgggactaggcgtggtggctcacacctgtaatcccagcactttaggaggccaaatgaggaagaccacttgaggccaggagtttgagaccaaactgggcaacacagggagacctcatatttgcaaaaaaattttaaaaattagcttagcagggccgggcgtggtggctcacgcctgtaatcccagcactttgggaggccgaggagggcggatcatgaagtcaggagattgagaccatcctggctaacatggcgaaaccctgtctctactaaaaatacaaaaaaattagccgggagtggtggcggtctcctgtagtcccatccactagggaagctgaggcaggagaatggcgtgaacccaggaagtggagcttgcagtgagccgagatcctgccactgcactccagcctgggcaacagagtgagactccgtctcaaaaaaaaaaaaaaaaaattagcttagcagcgcaatggctcacgcctgtaatcccagcactttgggaagctgaggcgggtggatcacttgaggtcgggagttcgagaccagcctgaccaacacggagaaaccccatctctactaaaaatacaaaattagcctagcatggtggtgcatacctgtaatcacagctacttgggaggctgaggcaggagaatcgcttgaacccaggaggcagagggtgcggcgagccaagattgcaccattgcactgcagcctgggcaacaagagtgaaactctgtcccaaaaaaaaaaaaattaattaattttaaaaataaataaaaaattagcttagcatggcacatgcctgagtcctagctatgcaggaggctgaggtgggatgatagcttgagccaaggaattcaaggctgcagtgagctgtgatcaagccactggactccagcctaggagacagaacaagactctgtctcaaaaaaaaaaaaaaaaaaaattcttccttacccaagcttataaacatatttacttgtattttcttctactacttttactgacttttgtttgtttattggttttgtttgtttgtttaagatggagtctcgctctatcacccagtctagagtgcagtggtgcgatctcagctcactgtaacctccacctgctggattcaagcaattctcctgcctcagcctcctgagtaggtgggactacaggcacatgccaccatgcccggctaattttttgtatttttagtagagacggggtttcaccacgctggccaggctggtctcaaactcctgaccttgtgatccacccacctcagcctcccaaagtgctgggattacaggtgtgagccaccacgcccggctatttgttttttaaacatatagttctttgatctacctggatttgtgtgtgggttttttttttcttcctctaaattttgtgaatggtatcctcaaattggataactggtggctcaacactttattgatgaatccatccattcttcatttatttaaaatgttacatatactaatcagggtttttaaggactcttatttgttcttttcatctatttttttgtagttccacaaataacaaattattttaaatccccaagctttataatgtgccttaaacaatctaatagggtaaatcctgccatattacactttttttgtggggtggggggtggggaaggagtctcactctgccgcccaggctggagtgcagtggtgcgaccttggctcactgcaacctccgcctcccaggttcaagcgattctcctgcctcggcctcctgagtagctgggattacaggtgtgtccaccatgcgcagctaatttttatattttagtagagacgggttttcaccatgttggccaggctggtcttgaattcccaacctcaggtgatccgtcagcctcaggcctcccaaagtgctgggattacaggcgtgagccacggtgcctggccatattattctgtttttgtgcactgtgtcctgcagatgaattttagaattagtgagtcaagtatcatgcaatcaaagcatgtttggattttggttgcaattatattgcatttataaattaattcagggagaacagacttctgtacagtactgctttatcatccaggaaggtaatatggctcaccaatgggtttgttctttcccactcttcaagttttatgctgttctctttatggaaacagtatgaacagcacgctgtagggttcggtttatccttagctgtcttatgctatttgtcgtccttttgcatgggatcgttgctgtttttttttttttgagacagagtcttgctctgttgcccaggctggagtacagtggtgcaaactaggctcactgcaacttctgcctcccgggttcaagcgagtctcctgcctcagcctcccgagtagctgggattacaggcacgcgccaccatgcctggctaatttttgtattcttagtagagacgtggtttcatcatgttggccaggctgtctcgaactcttgacctcgtgagccgcctgcctcagcctcccaaagtgctaggattacaggcgtgagccaccacacctggcctaagttttaatatatagaaaggcaggcctcacgtcactatcctttttgatgtttatattttggcgatacttggacattttcttttctaatatatttttaaaataatttaattcaaatcccaaagataatccattgatattctgactagaattacattaaatttatatattaacattgtaagaatgtgaataaatatacatatataaatacatatgtaaatatttaaatttctatattggaatttatagatgctataggtagtattaaatttatatatgaactgtatgaggatttttaaatctctatcaaggaacatggcacaactctccatttattcaattcttgttttatgttctgcattaattcgttttatcttttaaaaactgttaaaagaaaaacaggaagcactaaaagttgttcaaaataacaacaaatgttgtattctgtagtatttgtgtttaatgggctagtgtgttaggtgagtatcactaggtgcagaaagcgatcatcagatttttttttttttttttttgagacggagtctcgctctgtctcccaggctggagtgcagtggcaatctcggctcactgcaagctccgcctcccgggttcacgccattctcctgactcagcctcccgagtagctgggactacaggcgtctgcaaccacccccggctaattttttgtatttttagtagaggcggggtttcaccgtgttagccaggacggtctcgatctcctgacctcgtaatacgcctgcctcagcctcccaaagtgctgggattacaggcgtgagccaccgcacccggcgtgatcatcaaatttagcttgtgtatatcttttatagtgaactagaatattttaatgcaatcttattttcacgtgaatttttgaattgagatacagtttgaataacataaaattcaaccctttaacgtgtacaattcagtgttagtatactttagtattcagtgtttttgagttcatgaccaacatagtgaaacccagtctcttaaaaaacaaaattagccaggtgtgatggcacacccctgtagtcctggctacttgggaggctgagacaggaggatcatttgagcctaggagttctaggttacagtgaactatgatcacaccaccatactccagcctgggtgacaaggcaggaccctatgttaaaatatttttaatatataaaattgtttttaaaaaagaaagaaaccctgtaccattagcagccactgcccactccccacttcctctagcctctggcaactactaatctgctttccatctcaaaatgtgcctattttaaatgtttcacggaagtggaatcctacataggtgaccttttgtgtctggcttctctcacttagcataatgctgttgaagttcatttgccttgtagcatgcatcaatactttgttccttttttttttttttttttttttttgtgactgagtctcactctgttgcccaggctggagtacaatggtgcaatctcagttaactgcaacctccgcctcccaggttcaagcaattctcctgcctcaacctcccaagtagctgggattacaggcatgtgccaccacgcccagctaatttttttctatttttagtagagagggggtttcaccatattggccaggctggtcttgaactcctgatcttgtgatccgcccgcgttggcctcccaaggtgttggaattacaggcatgagccactgtgcccggccaggactttgttcctttttatggctgaataataaaatgccgcattttgtttattcaccagttgatagacatttgagttgtttctactttgaggctattatgaataatattgctatgaatactcatttacaaggttttgtctgaatgttgtccattctatgggaaatgtacctaggagtggagctgctgggtcatgtggtaaatccttgttaaaattactaagaaaacatcaaactgttttccatagcagctgcatcatttacattcccaccaacaatgtatgagggttccaatttctttacatcctcaccaacacttattttttattatttttttgagacagggtctggttctgtcacccaggctggagtgcaatggcaaaatgcaacctctgcctcccaggctcaagccatcctctcacctcaacctccctgggcaatttttgtatttttagttcactatattgcctaggctggtctcgaactcctgacctcaagccatataatattttataatttttttcagcctttttcacttttgtggttatatatccatctgttcccaataactgcacttttgttttcttttttcctgaattagacttgcagtatattggcttatttcatttttcaaagaaaacttattctttccactattttttggtttcacttatttaatctaatcttatatctctattaagtccctcttgctattggtttctatttttgattttctcaaattgaatcatgtagttcacttattttcaatcttttaaaaaattaagcatttaagactacaaattacctaaatacagatcccacatcaagtgttaatttgtattactttctagataattcataataccaattttgatttcctctttgatctaggggttatttaggaaggggcttcttgatttctgagttgtgttgtttatccccctctttagtaattttattatttacttgcatgttatttaattatgatccaagaatgtggcctattaaatctctacagtagggaatttattagggatttctctgctgggtgcagtggcttatgcctgcagtcccaacgttttgggaggccaaagtggtcaacatagcgacacctcgtctcattaaaacaaacaaacaaacaaacaacaacaaaaagaacggcaggatgtggtggcttacgcctgtaatcccagcactttcggaggccgaggcaggcagatcacctgaggacaggagtttgagaccagcctggccaacatgctaaaatcctgtctctactgaaaatacaaaaattagctgggcgtggtggcgcacatctgtaatcccagctactcgggaggctgaggcaggagaatcgcttgaacccggaaggcggacagtgagtcaagatcataccactgcactccagcctgtgcaacagagtgagactccatttcaaacaaacaaacaaacaaaacccacaaaaaaccgggggtggtggcacatgcctgtagtcccagctacttgggaggctgaagcagagggttccttgagcccaggaatttgaggctgcggtgagctgttatcacaccactgcattccaagcctgggtgacagaacaagacctggtctcaaataaataaataaataaatggatttatcagtggccaataaacagtcaacttttgtaaacattctatcacataagtgaatgtttgctttattccaatatttgatgttattttttgccaactcaatttttcaaaattctggaagaatactgaggcctcctactattatcgtggtgtcttgtttgtttttgtcttttaataaaggtcttgtatgtctgggaggttttgttttatgtatctggctactgtgatgttgggtgcctgtcatctcatggagtgaacctgttaacatacccatctttgtccaatttaatgcttcttggtgtcatattgggtttggcctggatttctggtgttgctcttccttctttttgttctcctgctacatggtatatggttcatccttttatttttagcctttgttacttttagatgtagctagattttgttttctaacacattgatttcacagtctgttttggtctggaaattcagcctgttcatattttttgaagtagctctgattttattctttttgtattacttctattatatttattacattttatactattttccttttttcttacttttgcagtcttttaagtttttcttcatttcctgctttcctctttgttaattgagatcccatgctttttagtttcagctctggaactgtatacctttcagttcctcacaatccagactgcagcccatcagttgtctatttgtcaccctgcaccatgcagctttacccccagcccagcttccccttggccgcaaaggacaccttttttttttttttttttgatgaagtctcgctctgttgccaggctggagtgcagtggcacaatctcggctcactgcaacctctgtctcctgggttcaagcgattctcatgcctcagcctcccgagtagctgggagtacaggcgcgcaccaccatgcccagctaatttttgtatttttagtagagacggggtttcaccatgttggccaggatggtcttgatctcttcacttcatgatccacccgcctcggcctcccaaagtgctgggattacaggcatgagccaccacgcccggcctggtttttttttttttttttgaaacagagtctcactctgtagcccagactggagtgcaatgacacaatcttggctcactgcaacttctgcctcctgggttcaagtgattctgctgcctcagcctcacaagtagctgggattacaggcatgcgccaccacgcctggctaatttttgtatttttagtagagacagggtttcgccacgttggccaggctggtctcgaactcctgacctcaagtgatccgccagtctcagcctcccaaagtgctgggattacaggtgtgagccacggtggctggccccaagaggagactttttgaatactttaatctcccccttctcactgggaatttaggaatttcgcagcatatttgtgcatctgttttaaaaatcaaagctgcctaggatttggcgggctctttcagtgtactcagtctccttcagattacggaagttctcctttattaccttcctgcttttgctccttctggaacttccattattcacgttggctctccttaatgtgttttcaaatctctttcccacccttatttccatttcttggctttttaacctctttgttctgcaatatatcttctacttgatattccacattactaatttggtcaccacggagaagtgtgcttttttgtctgggtcagtgcccgggctttcactactgtttctgataaagtctcttccatttaattgctacttcagtgagatctgccctattcccctccttctgagcctcctcaggtgagggttccccttttgtattgtgtctggttgctctcgatttttgtgttttcttaatgagtcagggctgctgagtagtagccaagcggggagtggttgaagttggcagtttctgctctctggaccgaggtgagaactggcaaaccatcagcccttgccgaggatggggtgggtgggggattgtttgcaggtctctctgacaaggggtgaccctctcctgacttcagcacacccaccccagcctggtcactctccaggtctctgagcaagtgggattgctgcccctcccagaggattcttaattcactgagatcctttctatttgggcagttggaggagaggattctctctcttcttcttttttttttttttttggtgttccttcaaggaaccatgaaattctgatttttgctccaggctttggggctactgctgcctagttttgcaggttgttaaccaaacaagagcatctggctaagtggatgcttaagtctctgctccttctacaaggctgtttgtggctgtccctggggagggagtgtgtttgcaggcaggaaagactacttgttgataatttgcacgaggacactcttttcttgccaggacaagtgtccccagggctgcattgaatctggagggtacttttctcatgaaggcactgctagtggctgccctaactggcctccaggggcttccttccctcctgtgctgcagtcccttggctctctgctggtaccaaggagagcctagttctggtctgtcctctttccagaacccagagtagaacctgcagtctcagatgcagcaaccctcttttttttattttttaaatcttatttatttttattttattttatttttttgagatggagtctccctctatcgccaaggctggagtgcagtggtgtgatctcgactcactgcaacctccgcctcccgggttcaagcaattgtgcctcagcctcccaagtagctgggattataggcgtgagccaccgcactggccgacttctacttaattatttcaaaaaagttggaatgtacagtaaaacaaaagaggcaggaaatgttttaagtctcaccatccagaaacaaatattgataattttgttcatctttctaacctctaagattaatatatatatatatatatatatatatatatatatttttttttttttttttttttttgaggcagtctcattctgtggcctaggctggagtgcagtggtatgatcatggctcactgcagcctcgacctcctgggcacaagtgatcttctcacttcagcctcctgagtagctgggactatacatacaccccaccaagcctgggtaattttaaaatattttgaaaagatggggtcttactatgttgctcaggctggtttcaaactcctgagctcaagtaatcctcctgcatcagcctcccgaagtgctgggattacaggtgtgagccactgcacctggcctatacacacttttttttttagatggagtctcgctctgttgtcaggctggagtgctgtggcgcaatctcggctcactgcaatctccgcctcccaggttcaagcaatttgcctacctcagccgcctgagtagctgggactacaggtgcccgcccccatgcccagctaatttttgtatttttagtagacacgaggtttcaccatgttggccaggatggtctcgatctcttgacttgtgatctgcccgcctcagcctcccaaagtgctgggattacaggcgtgagccaccgcggccgggcctataaacacactttttaaaaaacttcacatgatatcaaaattctcacatccaaatgatccataaacaacaacaacaaagtcctttacaattataaatgttcattgttgaaagattaccttgccagctagtatttatcttttggatatatatcttttgatatatatgtatttatttatatacttgtgtatatatttattcaacaaaaatgggattgtgctattcctaacccgcttttaaaaatttaatagtgtgaacgttcttccttgttacaaaacacaactgcatcactggatttttccagttttgctattataaataatacaatgataatctttgtgtgtataattgttgttgtttttttggagacagggctctgtcgcccaggctggagtgcagtggcgcgatctcagctcactgcagcctccgccttctgggttcaagcaatccttgtgcctcagccttccgagtagctgggaccacaggcctgcggcaccatgcctggctaatttttgtatttttagtagacacggggttttgccacattggccaggcttgtctcgaactcctggcctcaagtgatccaccctccttgacctcccaaagtgctgggattacagatgtgaaccactgcgcccagccagtgtgtatataattttgattttctaagtattccttaggtcatagaatatgcatattttaaaagctcttagcagagttgctgttcagaaaggctgggtgagtgtctgtcttcctagtaacagggcaggggtcagcctgtcctaccacactctcctactgcactctagccagtgttagtaacgtgcttctggtcacattttcacatgaaggctattaggagctattgacaaagtttaagtagacaaatcacataaccagatttgcatttttgattccggcttcagagcctaatagctctattagtcttatgtggcccctaggaggcattcaagataatggtgacactaagcaaaggagggcaagttgaggtggagtgtctgaacaagcaggtctctaacctgcagctatggagaagcaattcagtgtttcctgtggcgggtggagggcatacttacccagcagagcatgtgagactctttgatatgcaccttcatgtattatcttgttcagttctctgaggttgggatcattattatttcccattttgcagatgagagaattgaggcagagaaaggttcagcaccttgcctttggttacacagctggtcattctggcttcaatcgcaggactaccagcctgtgctcttcaccacttagcttccctgactcaggccacttccctggagcgttagctggattctgagagtagtttccaagccagagctttcagagagcttttgttcgtaggacaattttaagacatcaggttcttgaatgttttgtgtttttttaagtctcagatttatcttcctacttcctacttctccaaaaagactgagagctgacatatttgattgtaagctctttgaggcagagttcttgtaatcgtctctgtataaaacagtgcccaccccagtgacctgtacttggatgcttcaatcagagctgtcctgttaaatagagcaagtttttcctagacccacattctgatacaagaaaaatcaaaggaattatgattgaaccaattcaacacacactgttgcattttgtgtatgtgtttttggtgaacctgctttggaaacaatgtaaaagtcacatctgtggagtgtttttagagcacttttatgttcatttatgataatagggacctgcccaggcactgggctaggtgttccacatctactgtgtcattatgtaaattgtttttcacaagaacttgagaagctagcagtgtagctattattatccttggggtggtttgtttttggttctttgggttttttcccaggggaagaagctggagtttggacagcccctggcctacatgggctcccttttgcagaggctgctccagcggggatctccttgagctcaggtaaataagccagtgccaggccaggtcctctgcactcctttgtctattttcccctttgttccttggatctgaaaacccttcaaggcttcagaggaagctcagtgagttgattctcatgtaccgggagaagataatgtagaggcggcggaaccagaggagctggctgcggtggcaggacatggctttctagaagaatcaaagagaaccagttatgaaacagttgcactggagttgtttcattactttcagatctggcctccgcaccttaaatccttcctcgaactaatatgcttcatgctatagccttatctgtcttcttcctgtaacccacgaacctctctggattggcctcctgtcatggcccctgctttcccatctcctactacctgtgattataacacacaatgctcaccgtagctacagcactcaccatgggataccagaaaactggcagaacagtccacatgcatcatctcaatgttaacaaccctgtgaatcaagtactgttattactgttttttaaaaaataaatagatgaggaaactcgtcagtctcaaacagctagtaggtagtagagctggctgagattttaacccagagccaactgattgattctagagtccacattcttttttttttttttttttttttttgagcctgttgcccaggctggagtgcagtggcgcgatcttggctcactgcaagctctgcctcctgggttcacgccattctcctgcttcagccttccgagtagctgggactacaggcacctgccaccatgcctggctaattttttgtatatttagtagaggcagggtttcactgtgttagccaggatagtctcgatctcctgacctagtgatctgcccacctcggcctcccaaagtgctgggattacaggcgtgagccaccgcgcctggccagttagagtccacattcttaatcacgttgctactacctcaaatatacaacacaaacagggatgtttcatgggaagaaagctagtacactatgcccaaattcctctgagttaggtcgtttggggaggtccaatcactatcagaagaagaaaaaaaggaatggcacacaggtgtgagttgtcgttcctatcttctaggggaaatgtacattatcttgttattcagacctagtatagttcagtttttaaacagaatagattacagcaactgacttcactagatatacataaaaggatgtgcctgtttatctctaagtaccataattaacttgcctctctaagctaatatcttcacaaacttttatgtaaataaccccttttatattcattgtcagaccctacatgacttgccaggtatggaggctcacgcctgtaatcccagcactttgggaggctgaggtgggtggatcacctgaagtcgggagttcgagaccagcctgaccaacatggagaaactctgtctctactaaaaatacaaaattagccggcgtggtggcgcatacctgtaatcccagctactcgggaagctgaggcaggagaattgcttgaacccaggaggcggagattgcaattagaggagattgcaattagcggagattgcagtgaaccgagatcgccactgcactccagcctggtgacagagcgagactccgtctcaaaaaaataaataaataaatataaaatagaagataaagggaaaaccattacaaaagagagacattataagataataagacgaattggctaggcgcaatggctcatgcctgtaacctcagcaccttgggagcccgaggcaggtggatcacttgaggtcaggagtttgagaccagcctgaccaacatggtgaaaccctatctctactaaaaaaaaaaaaaatccaaaattagctgggcatggtggtgcacgcctgtaaccccagctactcaggaggctgaggcaggggactcgcttgaacccaggaggcagaggttgcagtgagccaagatcgcatcatcgcactccagcctgggcaacaagagcaaaactctgtctcaaaataaataaataaataaataagagaaataatctgctaacaaatatatcagctttgggcagggcacggtgtctcatgtttgtaatcctatcactttgggaggctgagttgtgcagatcaccaggtcaggagttcaagaccagcctggccaacatagtgaaaccccatctctactgaaaatacaaaacaattagccaggcttggtggtgccggcctgtctgtaatcccagctacgcaggaggctgaggcaggagaatcacttgaacccaggaggcagaggtttcagtgagctgagatcttaccactacactccagcctgggcaacagagcgagactctgtctcaaaaaaaaaaaaaaaaaaaaagatcagtgttacgaaaaccattcactgaccacaaagtaattaaattataaattaacaataaaaaggccccatacacggcagggcacagtggcccacacccgtaatctcaccactttgggaggttgaggtgggaggatcacctgaggtcaggagttcgagaccagcctgaccaacatggtgaaacttcgtctctactaaaaaatacaaaattagccaggcgtggtggcacctgcctgtaatcccagctacctgggaggctgaggcaggagaatcgtttgaacctgggaggtggaggttgcagtgagccaagatcgcaccattgcactccagcatgggcaccaagagtgaaactctgtctcagaaaaaaaaaaaaagaccacatatacacacacagccatgccattctcatttgtggtagttctacaaagtcactgaaaacactgaattagtgaatactgaaccattgtttctagtggaaatacagggttgggttcctccaagcctttggccacaatattttcatcaatcagtcaatatataaccttgttttgtgtatatttctgtttaaaaactccatatgaaatacatgttgttgattcattagcactgaactcatggccaatggcactgtaactcatgcttgtgatcaaacccacataaggcacattacagcctcttgtgcttaggaatgcaagacagcactcagcatcatccttagaggctattttaaacagcaaaatcaacaaaaaccacaaaaatgagaaaaatggggcattaaatatacacaaaaaggtatttttttacagtaggagagctgaaacagctgggaacatgcatatgtgcatccagtgactcatgtttcacccctctgcgagtgtccacgaatgactacaaaagcacttcgagcactgactttggagttacaaatgaattttagtgagtaggtgcattcataaatatagaactacaaataatgaagatcgacacatgtttgtaactgtaaattataccctcaaagattaaaggggaactcacaatggagtctataaattacttataattaaatgacaataggagaactacatatcaaaacttatcatgtgtagctaaagaaacacttcaaggaaaattaatagtattaaagtattttttttttaaagattgaaaatgaaaacaaagctaacctttcaagttaaagagatttaaagaagaacaggctgggtgcggtgactcccgcctgtaatcccagcactttgggaggccaagccgggtggatcacttgaggccagaagttcgagactggcctggccaaacatggcgaaacccagtctctactaaaaatacaaaaattagccgggcgaagtggcgggcccctatagtcccagctactcaggagactgagacaggagaattgcttgaacccaggaggtggaggttgtggtgagccgagatcgctccactgcactccagcctgggtgacagagcaagactctgtctcaaaaaataaaaataaataataaataaataggctgggtgcgatggctcacacctgtaatcccagcactttgggaggctgaggtgggcgatcacctgaggtcgggagttcgagaccagcctgaccaacatggggaaaccctgtctgtactaaaaatacaaaattagccaggcgtggtggcgtgtgcctgtgatcccagctacttgggacgctgaggcaggagaatcgcttaaacccgggaggcgaaggttgaggtgagccgagattgcaccattgtactccagcctgggcaataagagcgaaactccgtctcaaaaaaaaaccataaaataacagtaaaaagaaagaaagaaagacagacagacagacagaaagagggagggagggaggaaggaaggaaggaaggaaaagaataaaaccataaatgaagtaggacagaaataataaaatacaaaaacgaatgcactattgaagaaacaagataattaatatgtgctcaacactgcactctcagtacctagcaaagtgcctcttattaggtacaaaggtttactgtagaaaatttagaaaatatgggccgggcatggtggctcacgcctgtgatcccagcactatggaaggccaaggcgggtggatcacctgaggtcaggaattcaagatcagcctgaccaacatggcgaaaccccgtgtctactaaaaatacaaaattagctgggcatggtggcccatgcctgtaatcccagctactcgggagtgtgatgcagaaaaatcacttgaacccaggaggtggagggtgcagtgatctgagatcgcaccgttgcactccagcctgggcaacaagagcgaaactacatctaaaaaaaaaaaaaaaaaaaaaggcccggcgcagtggttcatgcctgtaatcc

SEQ ID NO: 328 - DNA, 32152 bp, Homo sapiens
agcatgccgtctgtagcatgggaggggcctggagcatagcagggcctctcacgggctttggtttcaggttgacatttaaaaggtgggcccggcacagtggctcacgcctgtaatcccagcactttgggaggccaagatggatggatcacctgaagtcaggagttgaggaccagcctggccaacatggtgaaaccctatctctactaaaaatacaaaaattagctgggcgttgtagtgcatgcctgtaatcccagctacttgggaggccaaggcaggagaatcacttgaacctgggaggtggaggttgcagtgagccgagatcacaccattgcactccagcctgggtgacaagagtgaaactccatctcaaaaaaaatgaaaataaaaaataaaaggttgtgttattttttacctttattttttggaggcctatttggtattgtggaaacattttcaaattcagagaatcaaaaaacaataaaatcacccaaatcctgtcaactaaaggtaaccactgttaatattttggtgtctgtctttgtgtattattttctactctgagaaatacatctaaacctattgtcttatgtttattaagtagaattttaccattctttttgttgataaactgcttatctcatttcccaatgaaaagcttatatacttatttgtaactttaattttattattttggggaattttttgtacttggtacaaaatttgaaaggtagaagaaaatgtgtatatacacagtgaaaaatctttccctactgtccccatgccccagtctccctcttccccacagccgatttcctggtctacttaccccatcactgtctctgcatcattgcagttgagtcccgtttttttctgattatcaacaacactggtgaacctccttggtatacatttttgacaatttagaaatttcttctttaggatcaattctcttagaaataagttctctggctattctgggcacacttcctacaccctgctctacaaggagcagttaaaaaaaaaagagagaaagaaaatctccaggttaaagaatacagattttttaaaaaagacttttagcacattatgggtaatgtggggttgggcggggctttaattccatccagataatgctggatggcttgggaccacttggcagtccttcgctgcttttctgtgctgcagtggctatggagtgagcaaggctcctcagggagctatttctataggaagcacaattctggacggtatggctggggaagcgtaaagagggttaacaaggataagaaacctccaccccttccccttcagctgtctgatttctctccctaaaggtaagccactgtttcttggatccctcttcaaagatacatatgcatataaaagcacatacaggccaggcacagtagctcatgcctgtagtcccagcactttggaaggccaaggcaggcagatcacttgagcccaggagttcaacaccagcctggacaacatagcgagacccccatgtctacaaaaaataaaaaatcggctaggtgtggtgttgcatgcctatagtcccaggtactcgggaggctgaggtgggagaatcacttgatcctgggaggtcaaggctgcagtaagctgtcgtcataccactgcactccagcctggataacagagtgagatcttgtctcaaaaaaacaaaacaaaacaaaacaaaaacaccacacataccagtatatagccttaaaaaaaaaaaaagaaatggtagcataccacgtacgttgttttataccttgcttaactttttttttgagacagtctcactctgttgcccaggctggagtgcagtggtgtgatctcggctcactgtaacctccgcctcccaggctcaagtgattctcctgcttcagcctcctgagtagctgggactacaggtgcccgccaccacatctggctaatttttacatttttagtacagacagggtttcaccatgttggccaggctggtcttgaactcctgacctcaagtgatctgcccaccttggcctcccaaagtgctgggattacaggcgtgagccactgcgcctggcctataccttgctttactttgtaactttggcaattgttccatgttagttttgtagagctgtctcattcttctcaaaagttggagaatatttcattttatgagtgtccataatgcctaaccggtcctctattgagggacattttcaatttttccaatctttagccttcataaacagtgctatagtatctatatacctatgtcattgagacatttggaatatatctgtataataaatttcaagaaatggaattgtgtgctaaagcatatgtacactttaaaattttggtagatgttgctaaattgtaccaattcctgttcctgtgactgatatatgtgagcacatatttctctacatacttgtcaataccatgttaacggctttgattttgcccacctgacagtgaaatacatctcattgaagttcctttggtgagcatttcataggctaaagagtgatttatttttctttctatctgaactgtccgttcatgtcctttgtccagtctcccgtttgtattatccattaaggaaattagcctgtctatgacgtctggcaaatatttttttcctggtttgtcctttgtggataaattaagcacagccatcagttttcttaagaccttgagccgttctgtttggggacatggagagccagtcccttgggtgaactgtctctccacataggccctgggaagcaagcactttccctccctgatgtgatgtatcagggaaggctcaaggctgaattctgtatgccgttgacctaagggaagctgtgagctgtcacgctccagactgacatgtctctggatagtgtagatgggtctctgtcctcaagaaggtcccagtctcttctggagataggaaatggcctcttagtacaaagagccctacagaagagctcctgccattaagttatttcaagatttttttttttaatggtgcgatctcagcccactgcagcctctacttccccaggctcaactgatgctcctacctcagcctcccaggtagctgggactacagatgtgtgccactgcacctggctaatttttatatttttttgtagaaacagggttttgccatgttgcccaggttggtcttgaactcctgggctcaagcaatccgcctgcctcggcctcaaagtgttgggattacaggcatgagccaccatgcctggccaaagatgttttttttttttttttttttgagacggagtctcgctctgttgcccaggctggagtgccgtggcatgatctcggctcactgcaagctcggccttccaggttcatgccattctcctgcctcagcctcccgagtagctgggactacaggcgcctgccaccacacccggctacaaaggtgtattttttaagtgacataaaaataaatgtctttggggccaggcgcagtggctcacacctgtaatcccagcactttgggaggccaaggtgggtgaatcatgaggtcaggagttcgagaccaacctggccaacatggtgaaaccctgtctgtactaaaaatacaaaaaattagctgggcatgggggcacgcgcctataatcccagctacttgggaggctgaggcaggaaaatctcttgaacccatgcaggtggaggttgcagtgagccaagattgcgccactgcactccagcctgagagacagtgggagactctgtctcaataaataaataaataaattaattaaataaataaatctctttgtaaaaaagaataccgtttgtctgttttcacctagggagctgagcacataacgacttacacgttcaatactcacaaagcccagcataccttctgtaagagatgtggcgttcagagcttctatactccacgatcaaaccccggaggcttcggtgagtaaaggggatggactgcaagctcagggggacacagagaggcccatggtgctctcatttaaagtcttatttggacaggtgggatgctgactagaccctgtcacatgcgtatcttagaggaacagggctcctcagcagagcgctttccacatgatagaatgtgagtcgggctccggtgaaacttttctgaatcccatatctgaatgtggtgaagttggacttggagcccatccaggttgtgattcttattcactggtgctggtagagctggtgttgctggggatggtgttgaagggtagggaggagaggggtgaggagatgggcttgtggggccaggggaggcagctttaataatgacaggggttaagggagtgaaggaggcaagattggggagcattgataatggcatttgaaagctttttggttgttcaaaaattaggcaggactggctggctgcggtggctcacacctgtatcccagcactttgggaggccaaggtgggaggatttcttgagctcaggagtttgagaccagcctgggaaacatagcaaaaccgtatctctgttctttttaaaaaataataaacaagcagggaaccctccaagccccgcttcagggcctgcttgggtctggggagtaataaaactaaccctctgacagttgttgagaatcataccaactatagtgtgaattgaaggggaaagcagaggtggaagatgttctgaggactcttgttgtgtcagtgcagcctccagagctgcgagagcagctatgactgtcagtgtcttttgccttatggtggtggggagcggacaggggaggtgggggaggcagggcagggcaggatgtcatccttaccgctcccccattgcttcagggcctcctgttcctcatctgtcacatggagactccttcctgtctaccttgcagaacaggaaagagttgaaaagtatgaaatcctgtgcaaatgggaagacatttaattcttagaaagttatctatctgaggccaggcatggtggctcacctgaggtcgggagttcgagaccagcctaaccaacatggagaaaccccatctttactaaaaatgcaaaattagccaggcttggtggcgcacgcctgtattcccagctacttgggaggctgaggcaggagaatcacttgaacccgtaaggcagaggttgcagtgagtcaagatcacgccattgtactccagcctgggcaacaagagctaaactccatctgaaaaaaaaggaaagaaagttatctatctaaacacaggaaaggcctgtgaattcttcaggctgccagtcagagattgctctgggctgtgcctttctgcatgttgtactctcaacttggtattgaatgttgtctagccttggccaaacctggctcagggagtgtgattcccatctggcagttgaggaaagtgagtcagagggctgaagcggtaggctggagccagtgctttccgagccagctggcagcctgtgggtctcatcactgaagccataagctgtggcatatcctttggaagccctaatgtgtagcgtgatgatgcctgcaggtgggggcttatccaggagccggtacaccatctggtctcacccatactgaggatccccctttgtctgtgccactttctcgtaggaattgccccccactgcctggatgagggcactgtgcggagtatggtcactgaggaattcaatggcagcgattgggagaaggccatgaaagagcacaagaccatcaagaacatgtctaaagagtgagcttctgcctctcctgccctgaaaaggaggaatgattggggccagcaactttgctctccctgccgtgcctcggtggtgctcctgaatgtggctgacctgggctgctggttccgtggactagggtcatcttgatctctgcagtttgctccagctaccagtttctttaggcagctctttgtcctccctctgcccagattttgatgtagtctaattgacatccttctcttcccaacttttgtgtgatcttttaggaaaaaaaataaatatttttaacattaaagcagtcactttggtttatcatttcttttgtactgtgatttgcttctgaggccagtcgattaatagcagatatatactcagcactatcaagatgtttgccaccaggcattgtggcttaagcctgtagttccagctactccggagggttgatcgagcccaggaggttgtggctgcagtgagctgtgttcgtgctactgcactccagcctgggtggcagaatgagactgtctcaaaaaaaaaataagaaaaaagaaaaaaatgtgtagctaaattggaaagaagacataagataaacaattattaaaaatggaagattgtggcagggcatggtggctcacacctgtaatcccagcactttgggaggctgaggcgggtggattacttgaggtcaggagttcaagaccagcctggccaatgtgttgagaccccgtctctactaaaattacaaaaattagctgggcatggtggcatgtgcctgtagtcccagctacttgtgaagctgaggcaggagaatcactcgaacccaggaggcagaggttgcagtgagtggagattgcaccactgcactccagcctgggtgatggagcgagactccatctacaaaaaaaaaaaaaaaggctgggcactgtggctcacgcctgtaattccagcactttgggaggccaaggcaggtggatcacctgagatcaggtgtttgagaccagcctggccaacatggtgaaactctgtttctactaaaaatacaaaaattagccaggcgtggtggcgggcgcctgtaatcccagctactcaggaggctgaggcaggataattgcttgaatccaggaggcagaggttgcagtgagccaagattgcgccactgcactccagcctggctgacagaaaaagactctgtctcaaaaaaaaaaaaaaaaaaaaaattgtgaatggttacaatccatgtgagctgtaaagataataagagctctaagagttcaaaggagagaactcagggaagtcttgaggagagtacgatttgagtctatctttaaaaagttaaatcagcttctaatttctttttcagttgtaaaatacacataaaatttaccataaactgttaatttatttagagacagaatctctctctttagttattttgagactgtcttgctcggtcacctaggctgcagtgcaatacatgaacatggctcactgtaaccttgacttagacttgagatctcccccctcttagcttctggagtagctgggactacaggtgtgtgccaccacatccggctaatattttttgtaaagacaaggtcactccatgttgccccggctggtctcaaactcctgggctcaagcagtcctcctgcctcggcctctcaaagtgttgtgattacaggcatgagccactgcacttggccttaaccatttttaagtgtacaattcagcagtgttaagtacattcacattgttgtgtagccatcattgccatccatctccagaactcttcaccttgcaaaactgaaactctgtacccatgaaacaacaactttgatcctatttttaaaggaagcaagatttcagctgggcatggtgtctcacgcctgtaatcccagcactttgggaggccgaggctggtggatggcctgagatctggagttcaagaccagcctggccaatgtggtgaaaccctgtctctactaaaaatacaaaaattagttgggcatggtggcgggcgcctgtaatcccagctactcgggaggctgaggcagaattgcttgaacccgggaggcagaggttgcagtgagccgagttcgtgccattgcactccagcctgggcaacaagagcaaaactccgtctcaatcaatcattcaatcaatcaatcaataaaggaagcaaggtttaaggagacaggagaagtaactgaacaggtacgcacacatgcaaaagccaggctgaagctgcatgtggtggtgcacacctgtagttgcagctacttaggaagctgagggccacatgagcccaggagttttgagactgcagtgagctatgatggtgtcatgcattccaccctgggagacacagcgagaccccatctcaaaaaaaaaaaaaaaaaaaaaaaaaaattggctgaattggaggcttttaatgggaagaagtaatgaagatatcagaaaggtatgttgaggatagactggatggtcttggatattaggctcaggaatttggcctttattttgcaggcattgggaagctgtgaccacctctgaacaggatgaataaagcctggcctcatatagtcttctgattggttgccatctccctctcttcttaacttcacattgctccatattactaacatattagctttcctcaaacattcctgccattaccaaatactgagtacaaataatggcaaatgcttaataaatatttgctctttgctttagggaaattactcatgaaatgatttgtgaggtagactagacaaggaaaaagaacagggagagggaataaagatctcagaacaaaggtctctgaggaaaaaaaaaaaattaaaaaaaaatgccgagtgtggtggctcacacctgtaatcccagcactctgggaggccaagaccggtggatcacctgaggtcaggagttcaagaccagcctggccaacatggtgaaacctcgtctctactaaaaatacaaaaattagctgggcgtggtgttgggcatctgtaatcccagctactcaggaggctgaggcaggagaatggcttgagcccaggaggcagaggttgcagtaagctgagatgatgccactgcactccagcctggaagacagagtgagactctgtctcaaaaacaaaaaacaaacaaacaaacaaaatacagatggccaggccaggcatggtggctcacacctgtaatacagcactatggaaggctgaggcaggaggattgcttaagccctagagttcaagaccagactgggcaatgtagtgagacccccccatctctacaggaaacaataaaatacaataaaaatggcagtttctcagtttgctgtgctgggttctatgtggtcactgtctcttcagaatcactgatggccaggttcactcttcaagactggaagcagcacgcacaaggatgggattttcgaggccagaactccaggtatttttaattttttttaattttaaaattatacaggggccaagcacggtggctcacacctgtaattccggtactttgggagaacatggcaaaaccctgtctctactaaaaatacaaaaaatcaggctgggcgcggtagctcatgcctgtaatcccagcactttgggaggccaaggcaggtggatcacctgagatcaggagtctgagcccagcctggccaacatggcgaaaccccatctctactaaaaatacaaaaattagccgggcatggttgtgtacacctttaatcccagctactaaggaggctgaggcaagagaattgcttgaacctgggaagcggtggttgcagcaagtcaagattgtgtgccattgcaatccagcctgggtgacagcaagactccgtctcaaaaaataaataaataaataaataaataagtaaataaaaagtaaaaaaaattagctgggtgtgttggtgctcacctgtagtcccagttactcaggaggctgaggtgggaggatcacctgagcccgggaagttgaggctgcagtgagctgtgatcgcaccattgcactacagcctgggtgacagagcaagactccgtcttaaaaaaaaaattattttttttagggatatgtgatcacagctcactgtaaccttgaactccttacttcaagcagtcctaccacagcctacaggtgtgtgccaccccctggctaattttttaaaattttttgtagagatggggtcatgctatgttgcccaggctgctctcaaactcctggcctcaagtgagcctcctgccttggcctccctaagtgctgggattataggtgggagccactgcattcggttgcatttctttatttaattacatcttgatcttttcatatcaatatacatatcctcattattaactgttgcatagaacagcatagtgtgggtgtagtttatttagctattctttttttcacggaaattatgattgtttacagttttttgctattaccaagagtgttgacagtgaacattcttgtacacacctctttatacatacatatgtgtattatttgagaatagagaagtgggattgctgagctgaaagatatgcatttgtttttttgggttttttttttttttttgagatggagtttcgctcttgttgcccaggctggagtaaaatggcgtgacttggctcactgaaacctctgcctccctagttcaagcaattctcctgcctcagcctcccaagtagctgggattacaagcacccaccaccacgcccagctaatttttttgtatttttggtagagacggggttttactacgttggccaggctggtctccaactcctgaactcatgatccacccacctcggcctctcaaagtgctgggattacaggcatgagccaccacacctggctgagttttaatttttgatggagtcaaattcattagtcttttttttttttttttcttttggcttagtggctctctgacttgggttttctgggttttttgtgatttatttatttcttttttcttcttcttcttcttcttttttttttttttttttttttttgagatggagtcggtctctgttgcccaggctggagggcaatggcatgatctcggctcattgcaacctctgcctcccgggttcaaacgattctcctgcctcagcctcctgagtagctgtgattacaggcgtgcgccaccacgcccagctaatttttgtatttttagtagaaacagggtttcaccatgttggtcaggctggtcttgaattcctgaccttgcgatccgcccgccttggcctcccaaagtgctgggattacaggcgtgagccaccgcagccggctgtgatttatttcttttttgagaatatctttctgggactaggcgtggtggctcacacctgtaatcccagcactttaggaggccaaatgaggaagaccacttgaggccaggagtttgagaccaaactgggcaacacagggagacctcatatttgcaaaaaaattttaaaaattagcttagcagggccgggcgtggttgctcatgcctgtaatcccagcactttgggaggccgaggagggcggatcatgaagtcaggagattgagaccatcctggctaacatggcgaaaccctgtctctactaaaaatacaaaaaaattagccgggagtggtggcggtctcctgtagtcccatcccctagggaagctgaggcaggagaatggcgtgaacccaggaagtggagcttgcagtgagccgagatcctgccactgcactccagcctgggcaacagagtgagactccgtctcaaaaaaaaaaaaaaaaaattagcttagcagcgcaatggctcacgcctgtaatcccagcactttgggaagctgaggcgggtggatcacttgaggtcgggagttcgagaccagcctgaccaacacggagaaaccccatctctactaaaaatacaaaattagcctagcatggtggtgcatacctgtaatcacagctacttgggaggctgaggcaggagaatcgcttgaacccaggaggcagagggtgcggcgagccaagattgcaccattgcactgcagcctgggcaacaagagtgaaactctgtccccaaaaaaaaaaaaattaattaattttaaaaataaataaaaaattagcttagcatggcacatgcctgagtcctagctatgcaggaggctgaggtgggatgatagcttgagccaaggaattcaaggctgcagtgagctgtgatcaagccactggactccagcctaggagacagaacaagactctgtctcaaaaaaaaaaaaaaaaaaaattcttccttacccaagcttataaacatatttacgtgtattttcttctactacttttactgacttttgtttgtttattggttttgtttgtttgtttaagatggagtctcgctctatcacccagtctagagtgcagtggtgcgatctcagctcactgtaacctccacctgctggattcaagcaattctcctgcctcagcctcctgagtaggtgggactacaggcacatgccaccatgcccggctaattttttgtatttttagtagagacggggtttcaccacgctggccaggctggtctcaaactcctgaccttgtgatccacccacctcagcctcccaaagtgctgggattacaggtgtgagccaccacgcccggctatttgttttttaaacatatagttctttgatctacctggatttgtgtgtgggttttttttttcttcctctaaattttgtgaatggtatcctcaaattggataactggtggctcaacactttattgatgaatccatccattcttcatttatttaaaatgttacatatactaatcagggtttttaaggactcttatttgttcttttcatctatttttttgtagttccacaaataacaaattattttaaatccccaagctttataatgtgccttaaacaatctaatagggtaaatcctgccatattacactttttttgtggggtggggggtggggaaggagtctcactctgccgcccaggctggagtgcagtggtgcgaccttggctcactgcaacctccgcctcccaggttcaagcgattctcctgcctcggcctcctgagtagctgggattacaggtgtgtccaccatgcgcagctaatttttatattttagtagagacgggttttcaccatgttggccaggctggtcttgaattcccaacctcaggtgatccgtcagcctcaggcctcccaaagtgctgggattacaggcgtgagccaccgtgcctggccatattattctgtttttgtgcactgtgtcctgcagatgaattttagaattagtgagtcaagtatcatgcaatcaaagcatgtttggattttggttgcaattatattgcatttataaattaattcagggagaacagacttctgtacagtactgctttatcatccaggaaggtaatatggctcaccaatgggtttgttctttcccactcttcaagttttatgctgttctctttatggaaacagtatgaacagcacgctgtagggttcggtttatccttagctgtcttatgctatttgtcgtccttttgcatgggatcgttgctgttttttttttttgagacagagtcttgctctgttgcccaggctggagcacagtggtgcaaaccaggctcactgcaacttctgcctcccgggttcaagcgagtctcctgcctcagcctcccgagtagctgggattacaggcacgcgccaccatgcctggctaatttttgtattcttagtagagatgtggtttcatcatgttggccaggctgtctcgaactcttgacctcgtgagccgcctgcctcagcctcccaaagtgctaggattacaggcgtgagccaccacacctggcctaagttttaatatatagaaaggcaggcctcacatcactatcctttttgatgtttatattttggcaatacttggacattttcttttctaatatatttttaaaataatttaattcaaatcccaaagataatccattgatattctgactagaattacattaaatttatatattaacattgtaagaatgtgaataaatatacatatataaatacatatgtaaatatttaaatttctatattggaatttatagatgctataggtagtattaaatttatatatgaactgtatgaggatttttaaatctctatcaaggaacatggcacaactctccatttattcaattcttgttttatgttctgcattaattcgttttatcttttaaaaactgttaaaagaaaaacaggaagcactaaaagttgttcaaaataacaacaaatgttgtattctgtagtatttgtgtttaatgggctagtgtgttaggtgagtatcactaggtgcagaaagcgatcatcagatttttttttttttttttttgagacggagtctcgctctgtctcccaggctggagtgcagtggcaatctcggctcactgcaagctccgcctcccgggttcacgccattctcctgactcagcctcccgagtagctgggactacaggcgtctgcaaccacccccggctaattttttgtatttttagtagaggcggggtttcaccgtgttagccaggacggtctcgatctcctgacctcgtaatacgcctgcctcagcctcccaaagtgctgggattacaggcgtgagccaccgcacccggcgtgatcatcaaatttagcttgtgtatatcttttatagtgaactagaatattttaatgcaatcttattttcacgtgaatttttgaattgagatacagtttgaataacataaaattcaaccctttaacgtgtacaattcagtgttagtatactttagtattcagtgtttttgagttcatgaccaacatagtgaaacccagtctcttaaaaaacaaaattagccaggtgtgatggcacaccctgtagtcctggctacttgggaggctgagacaggaggatcatttgagcctaggagttctaggttacagtgaactatgatcacaccaccatactccagcctgggtgacaaggcaggaccctatgttaaaatatttttaatatataaaattgtttttaaaaaagaaagaaaccctgtaccattagcagccactgcccactccccacttcctctagcctctggcaactactaatctgctttccatctcaaaatgtgcctattttaaatgtttcacggaagtggaatcctacataggtgaccttttgtgtctggcttctctcacttagcataatgctgttgaagttcatttgccttgtagcatgcatcaatactttgttcctttttttttttttttttttttttgtgactgagtctcactctgttgcccaggctggagtacaatggtgcaatctcagttaactgcaacctccgcctcccaggttcaagcaattctcctgcctcaacctcccaagtagctgggattacaggcatgtgccaccacgcccagctaatttttttctatttttagtagagagggggtttcaccatattggccaggctggtcttgaactcctgatcttgtgatccgcccgcgttggcctcccaaggtgttggaattacaggcatgagccactgtgcccggccaggactttgttcctttttatggctgaataataaaatgccgcattttgtttattcaccagttgatagacatttgagttgtttctactttgaggctattatgaataatattgctatgaatactcatttacaaggttttgtctgaatgttttccattctatgggaaatgtacctaggagtggagctgctgggtcatgtggtaaatccttgttaaaattactaagaaaacatcaaactgttttccatagcagctgcatcatttacattcccaccaacaatgtatgagggttccaatttctttacatcctcaccaacacttattttttattatttttttgagacagggtctggttctgtcacccaggctggagtgcaatggcaaaatgcaacctctgcctcccaggctcaagccatcctctcacctcaacctccctgggcaatttttgtatttttagttcactatattgcctaggctggtctcgaactcctgacctcaagccatataatattttataatttttttcagcctttttcacttttgtggttatatatccatctgttcccaataactgcacttttgttttcttttttcctgaattagacttgcagtatattggcttatttcatttttcaaagaaaacttattctttccactattttttggtttcacttatttaatctaatcttatatctctattaagtccctcttgctattggtttctatttttgattttctcaaattgaatcatgtagttcacttattttcaatcttttaaaaaattaagcatttaagactacaaattacctaaatacagatcccacatcaagtgttaatttgtattactttctagataattcataataccaattttgatttcctctttgatctaggggttatttaggaaggggcttcttgatttctgagttgtgttgtttatccccctctttagtaattttattatttacttgcatgttatttaattatgatccaagaatgtggcctattaaatctctacagtagggaatttattagggatttctctgctgggtgcagtggcttatgcctgcagtcccaatgttttgggaggccaaagtggtcaacatagcgacacctcgtctcattaaaacaaacaaacaaacaaacaacaacaaaaagaacggcaggatgtggtggcttacgcctgtaatcccagcactttcggaggccgaggcaggcagatcacctgaggacaggagtttgagaccagcctggccaacatgctaaaatcctgtctctactgaaaatacaaaaattagctgggcgtggtggcgcacatctgtaatcccagctactcgggaggctgaggcaggagaatcgcttgaacccggaaggcggacagtgagtcaagatcataccactgcactccagcctgtgcaacagagtgagactccatttcaaacaaacaaacaaacaaaacccacaaaaaaccgggggtggtggcacatgcctgtagtcccagctacttgggaggctgaagcagagggttccttgagcccaggaatttgaggctgcggtgagctgttatcacaccactgcattccaagcctgggtgacagaacaagacctggtctcaaataaataaataaataaatggatttatcagtggccaataaacagtcaacttttgtaaacattctatcacataagtgaatgtttgctttattccaatatttgatgttattttttgccaactcaatttttcaaaattctggaagaatactgaggcctcctactattatcgtggtgtcttgtttgtttttgtcttttaataaaggtcttgtatgtctgggaggttttgttttatgtatctggctactgtgatgttgggtgcctgtcatctcatggagtgaacctgttaacatacccatctttgtccaatttaatgcttcttggtgtcatattgggtttggcctggatttctggtgttgctcttccttctttttgttctcctgctacatggtatatggttcatccttttatttttagcctttgttacttttagatgtagctagattttgttttctaacacattgatttcacagtctgttttggtctggaaattcagcctgttcatattttttgaagtagctctgattttattctttttgtattacttctattatatttattacattttatactattttccttttttcttacttttgcagtcttttaagtttttcttcatttcctgctttcctctttgttaattgagatcccatgctttttagtttcagccctggaactgtatacctttcagttcctcacaatccagactgcagcccatcagttgtctatttgtcaccctgcaccatgcagctttacccccagcccagcttccccttggccgcaaaggacacctttgttttttttttttttgatgaagtctcgctctgttgccaggctggagtgcagtggcacaatctcggctcactgcaacctctgtctcctgggttcaagcgattctcatgcctcagcctcccgagtagctgggagtacaggcgcgcaccaccatgcccagctaatttttgtatttttagtagagacggggtttcaccatgttggccaggatggtcttttttttttttttttttttttttgagacggagtctcgctgtcgcccaggctggagtgcagtggcgcaatctcggctcactgcaggctccgccccctggggttcacgccattctcctgcctcagcctcccgagtagctgggactacaggcgcccgccacctcgcccggctaattttttgtatttttagtagagacggggtttcaccgtgttagccaggatggtctcgatctcctgacctcgtgatccgcccgcctcggcctcccaaagtgctgggattacaggcgtgagccaccgcgcccggccaaccaggatggtcttgatctcttcacttcatgatccacccgcctcggcctcccaaagtgctgggattacaggcatgagccaccacgcccggcctggttttttttttttttttttttgaaacagagtctcactctgtagcccagactggagtgcaatgacacaatcttggctcactgcaacttctgcctcctgggttcaagtgattctgctgcctcagcctcacaagtagctgggattacaggcatgcgccaccacgcctggctaatttttgtatttttagtagagacagggtttcgccacgttggccaggctggtctcgaactcctgacctcaagtgatccgccagtctcagcctcccaaagtgctgggattacaggtgtgagccacggtggctggccccaagaggagactttttgaatactttaatctcccccttctcactgggaatttaggaatttcgcagcatatttgtgcatctgttttaaaaatcaaagctgcctaggatttggcgggctctttcagtgtactcagtctccttcagattacggaagttctcctttattaccttcctgcttttgctccttctggaacttccattattcacgttggctctccttaatgtgttttcaaatctctttcccacccttatttccatttcttggctttttaacctctttgttctgcaatatatcttctacttgatattccacattactaatttagtcaccacggagaagtgtgcttttttgtctgggtcagtgcccgggctttcactactgtttctgataaagtctcttccatttaattgctacttcagtgagatctgccctattcccctccttctgagcctcctcaggtgagggttccccttttgtattgtgtctggttgctctcgatttttgtgttttcttaatgagtcagggctgctgagtagtagccaagcggggagtggttgaagttggcagtttctgctctctggaccgaggtgagaactggcaaaccatcagcccttgccgaggatggggtgggtgggggattgtttgcaggtctctctgacaaggggtgaccctctcctgacttcagcacacccaccccagcctggtcactctccaggtctctgagcaagtgggattgctgcccctcccagaggattcttaattcactgagatcctttctatttgggcagttggaggagaggattctctctcttcttcttttttttttttttttggtgttccttcaaggaaccatgaaattctgatttttgctccaggctttggggctactgctgcctagttttgcaggttgttaaccaaacaagagcatctggctaagtggatgcttaagtctctgctccttctacaaggctgtttgtggctgtccctggggagggagtgtgtttgcaggcaggaaagactacttgttgataatttgcacgaggacactcttttcttgccaggacaagtgtccccagggctgcattgaatctggagggtacttttctcatgaaggcactgctagtggctgccctaactggcctccaggggcttccttccctcctgtgctgcagtcccttggctctctgctggtaccaaggagagcctagttctggtctgtcctctttccagaacccagagtagaacctgcagtctcagatgcagcaaccctcttttttttattttttaaatcttatttatttttattttattttatttttttgagatggagtctccctctatcgccaaggctggagtgcagtggtgtgatctcgactcactgcaacctccgcctcccgggttcaagcaattgtgcctcagcctcccaagtagctgggattataggcgtgagccaccgcactggccgacttctacttaattatttcaaaaaagttggaatgtacagtaaaacaaaagaggcaggaaatgttttaagtctcaccatccagaaacaaatattgataattttgttcatctttctaacctctaagattaatatatatatatatatatatatatatttttttttttttttttttgaggcagtctcattctgtggcctaggctggagtgcagtggtatgatcatggctcactgcagcctcgacctcctgggcacaagtgatcttctcacttcagcctcctgagtagctgggactatacatacaccccaccaagcctgggtaattttaaaatattttgaaaagatggggtcttactatgttgctcaggctggtttcaaactcctgagctcaagtaatcctcctgcatcagcctcccgaagtgctgggattacaggtgtgagccactgcacctggcctatacacacttttttttttagatggagtctcgctctgttgtcaggctggagtgctgtggcgcgatctcggctcactgcaatctccgcctcccaggttcaagcaatttgcctacctcagccgcctgagtagctgggactacaggtgcccgcccccatgcccagctaatttttgtatttttagtagacacgaggtttcaccatgttggccaggatggtctcgatctcttgacttgtgatctgcccgcctcagcctcccaaagtgctgggattacaggcatgagccaccgcggccgggcctataaacacactttttaaaaaacttcacatgatatcaaaattctcacatccaaatgatccataaacaacaacaacaaagtcctttacaattataaatgttcattgttgaaagattaccttgccagctagtatttatcttttggatatatatcttttgatatatatgtatttatttatatacttgtgtatatatttattcaacaaaaatgggattgtgctattcctaacccgcttttaaaaatttaatagtgtgaacgttcttccttgttacaaaacacaactgcatcactggatttttccagttttgctattataaataatacaatgataatctttgtgtgtataattgttgttgtttttttggagacagggctctgtcgcccaggctggagtgcagtggcgcgatctcagctcactgcagcctccgccttctgggttcaagcaatccttgtgcctcagccttccgagtagctgggaccacaggcctgcggcaccatgcctggctaatttttgtatttttagtcgacacggggttttgccacattggccaggcttgtctcgaactcctggcctcaagtgatccaccctccttgacctcccaaagtgctgggattacagatgtgaaccactgcgcccagccagtgtgtatataattttgattttctaagtattccttaggtcatagaatatgcatattttaaaagctcttagcagagttgctgttcagaaaggctgggtgagtgtctgtcttcctagtaacagggcagaggtcagcctgtcctaccacactctcctactgcactctagccagtgttagtaacgtgtttctggtcacattttcacatgaaggctattaggagctattgacaaagtttaagtagacaaatcacataaccagatttgcatttttgattccggcttcagagcctaatagctctattagtcttatgtggcccctaggaggcattcaagataatggtgacactaagcaaaggagggcaagttgaggtggagtgtctgaacaagcaggtctctaacctgcagctatggagaagcaattcagtgtttcctgtggcgggtggagggcatacttacccagcagagcatgtgagactctttgatatgcaccttcatgtattatcttgttcagttctctgaggttgggatcattattatttcccattttgcagatgagagaattgaggcagagaaaggttcagcaccttgcctttggttacacagctggtcattctggcttcaatcgcaggactaccagcctgtgctcttcaccacttagcttccctgactcaggccacttccctggagcgttagctggattctgagagtagtttccaagccagagctttcagagagcttttgttcgtaggacaattttaagacatcaggttcttgaatgttttgtgtttttttaagtctcagatttatcttcctacttcctacttctccaaaaagactgagagctgacatatttgattgtaagctctttgaggcagagttcttgtaatcgtctctgtataaaacagtgcccaccccagtgacctgtacttggatgcttcaatcagagctgtcctgttaaatagagcaagtttttcctagacccacattctgatacaagaaaaatcaaaggaattatgattgaaccaattcaacacacactgttgcattttgtgtatgtgtttttggtgaacctgctttggaaacaatgtaaaagtcacatctgtgggagtggttttagagcacttttatgttcatttatgataatagggacctgcccaggcactgggctaggtgttccacatctactgtgtcattatgtaaattgtttttcacaagaacttgagaagctagcagtgtagctattattatccttggggtggtttgtttttggttctttgggttttttcccaggggaagaagctggagtttggacagcccctggcctacatgggctcccttttgcagaggctgctccagcggggatctccttgagctcaggtaaataagccagtgccaggccaggtcctctgcactcctttgtctattttcccctttgttccttggacctgaaaacccttcaaggcttcagaggaagctcagtgagttgattctcatgtaccgggagaagataatgtagaggcggcggaaccagaggagctggctgcggtggcaggacatggctttctagaagaatcaaagagaaccagttatgaaacagttgcactggagttgtttcattactttcagatctggcctccgcaccttaaatccttcctcgaactaatatgcttcatgctatagccttatctgtcttcttcctgtaacccacgaacctctctggattggcctcctgtcatggcccctgctttcccatctcctactacctgtgattataacacacaatgctcaccgtagctacagcactcaccatgggataccagaaaactggcagaacagtccacatgcatcatctcaatgttaacaaccctgtgaatcaagtactgttattactgttttttaaaaaataaatagatgaggaaactcgtcagtctcaaacagctagtaggtagtagagctggctgagattttaacccagagccaactgattgattctagagtccacattcttttttttttttttttttttttgagcctgttgcaccaagctggagtgcagtggcgcgatcttggctcactgcaagctctgcctcctgggttcacgccattctcctgcttcagccttccgagtagctgggactacaggcacctgccaccatgcctggctaattttttgtatatttagtagaggcagggtttcactgtgttagccaggatagtctcgatctcctgacctagtgatctgcccacctcggcctcccaaagtgctgggattacaggcgtgagccaccgcgcctggccagttagagtccacattcttaatcacgttgctactacctcaaatatacaacacaaacagggatgtttcatgggaagaaagctagtacactatgcccaaattcctctgagttaggtcgtttggggaggtccaatcactatcagaagaagaaaaaaaggaatggcacacaggtgtgagttgtcgttcctatcttctaggggaaatgtacattatcttgttattcagacctagtatagttcagtttttaaacagaatagattacagcaactgacttcactagatatacataaaaggatgtgcctgtttatctctaagtaccataattaacttgcctctctaagctaatatcttcacaaacttttatgtaaataaccccttttatattcattgtcagaccctacatgacttgccaggtatggaggctcacgcctgtaatcccagcactttgggaggctgaggtgggtggatcacctgaagtcgggagttcgagaccagcctgaccaacatggagaaactctgtctctactaaaaatacaaaattagccggcgtggtggcgcatacctgtaatcccagctactcgggaagctgaggcaggagaattgcttgaacccaggaggcggagattgcaattagaggagattgcaattagcggagattgcagtgaaccgagatcgccactgcactccagcctggtgacagagcgagactccgtctcaaaaaaataaataaataaatataaaatagaagataaagggaaaaccattacaaaagagagacattataagataataagacgaattggctaggcgcaatggctcatgcctgtaacctcagcaccttgggagcccgaggcaggtggatcacttgaggtcaggagtttgagaccagcctgaccaacatggtgaaaccctatctctactaaaaaaaaaaaaatccaaaattagctgggcatggtggtgcacgcctgtaaccccagctactcaggaggctgaggcaggggactcgcttgaacccaggaggcagaggttgcagtgagccaagatcgcatcatcgcactccagcctgggcaacaagagcaaaactctgtctcaaaataaataaataaataaataagagaaataatctgctaacaaatatatcagctttgggcagggcacggtgtctcatgtttgtaatcctatcactttgggaggctgagttgtgcagatcaccaggtcaggagttcaagaccagcctggccaacatagtgaaaccccatctctactgaaaatacaaaacaattagccaggcttggtggtgccggcctgtctgtaatcccagctacgcaggaggctgaggcaggagaatcacttgaacccaggaggcagaggtttcagtgagctgagatcttaccactacactccagcctgggcaacagagcgagactctgtctcaaaaaaaaaaaaaaaaaaaagatcagtgttacgaaaaccattcactgaccacaaagtaattaaattataaattaacaataaaaaggccccatacacggcagggcacagtggcccacacccgtaatctcaccactttgggaggttgaggtgggaggatcacctgaggtcaggagttcgagaccagcctgaccaacatggtgaaacttcgtctctactaaaaaatacaaaattagccaggcgtggtggcacctgcctgtaatcccagctacctgggaggctgaggcaggagaatcgtttgaacctgggaggtggaggttgcagtgagccaagatcgcaccattgcactccagcatgggcaccaagagtgaaactctgtctcagaaaaaaaaaaaaagaccacatatacacacacagccatgccattctcatttgtggtagttctacaaagtcactgaaaacactgaattagtgaatactgaaccattgtttctagtggaaatacagggttgggttcctccaagcctttggccacaatattttcatcaatcagtcaatatataaccttgttttgtgtatatttctgtttaaaaactccatatgaaatacatgttgttgattcattagcactgaactcatggccaatggcactgtaactcatgcttgtgatcaaacccacataaggcacattacagcctcttgtgcttaggaatgcaagacagcactcagcatcatccttagaggctattttaaacagcaaaatcaacaaaaaccacaaaaatgagaaaaatggggcattaaatatacacaaaaaggtatttttttacagtaggagagctgaaacagctgggaacatgcatatgtgcatccagtgactcatgtttcacccctctgcgagtgtccacgaatgactacaaaagcacttcgagcactgactttggagttacaaatgaattttagtgagtaggtgcattcataaatatagaactacaaataatgaagatcgacacatgtttgtaactgtaaattataccctcaaagattaaaggggaactcacaatggagtctataaattacttataattaaatgacaataggagaactacatatcaaaacttatcatgtgtagctaaagaaacacttcaaggaaaattaatagtattaaagtattttttttttaaagattgaaaatgaaaacaaagctaacctttcaagttaaagagatttaaagaagaacaggctgggtgcggtgactcccgcctgtaatcccagcactttgggaggccaagccgggtggatcacttgaggccagaagttcgagactggcctggccaaacatggcgaaacccagtctctactaaaaatacaaaaattagccgggcgaagtggcgggcccctatagtcccagctactcaggagactgagacaggagaattgcttgaacccaggaggtggaggttgtggtgagccgagatcgctccactgcactccagcctgggtgacagagcaagactctgtctcaaaaaataaaaataaataataaataaataggctgggtgcgatggctcacacctgtaatcccagcactttgggaggctgaggtgggcgatcacctgaggtcgggagttcgagaccagcctgaccaacatggggaaaccctgtctgtactaaaaatacaaaattagccaggcgtggtggcgtgtgcctgtgatcccagctacttgggacgctgaggcaggagaatcgcttaaacccgggaggcgaaggttgaggtgagccgagattgcaccattgtactccagcctgggcaataagagcgaaactccgtctcaaaaaaaaaccataaaataacagtaaaaagaaagaaagaaagacagacagacagacagaaagagggagggagggaggaaggaaggaaggaaggaaaagaataaaaccataaatgaagtaggacagaaataataaaatacaaaaacgaatgcactattgaagaaacaagataattaatatgtgctcaacactgcactctcagtacctagcaaagtgcctcttattaggtacaaaggtttacggtagaaaatttagaaaatatgggccgggcatggtggctcacgcctgtgatcccagcactatggaaggccaaggcgggtggatcacctgaggtcaggaattcaagatcagcctgaccaacatggcgaaaccccgtgtctactaaaaatacaaaattagctgggcatggtggcccatgcctgtaatcccagctactcgggagtgtgatgcagaaaaatcacttgaacccaggaggtggagggtgcagtgatctgagatcgcaccgttgcactccagcctgggcaacaagagcgaaactacatctaaaaaaaaaaaaaaaaaaaaaggcccggcgcagtggttcatgcctgtaatcccagcactttgggaagcagaggggagcggatcatttgaggtcaggagttcaagaccaacctggccaacatggtgaaaccctgcctctactaaaaatacaaaaattagctaggcgtggtggcatgcgcctgtagtcccagttacttgagaggctgaggcaggagaattgcttgaacctgggaggcagaggttgttgtgagctgagatcgtgccattgcaccccagcctgggtgacagagcaagactctgtctcaaaaaaaaaaaaaaaaaaaaatggccaggcacagtggctcatgcctgtaatcccagcactttgggaggccgaggtgggtagatcacctgcggtcaggagttcgagaccagcctgaccaatatggtgaaatcccatctctattaaaaatacaaaaattagctgggcctggtggcgtgaacctgtagtcccagttactggagaggctgagacagaagaattgcttgaacctgggaggtggaggttgcaatgagccgagattgtgccactgcactccagcctgggtgacagaggaagacttcatctcaaagaaaatttagaaaataaagctaaacaaaaaaaccccaaaaccaaaatcattatcctgagtttctattctcttagattttccttccttccttcctttcttccttccttccttccttcttcttttcttttctttctctctctctctctcccgctttccctccctccctcccttgtttcctcccttccttccctccttccctcccttccttctttccttccctccctcccttccttcctctctccttttctctccctcccctctctttctttcttccttctttcctctctctcttccttccttcttccttcccttcccttccttccttcgcttcccttccttccttcccttcccttccccttcctccctccctcccctcccctctcctccccttcctccctcctttccttccttccttccttccttccttccttccttccttccttccttttctttctctcactctctccttctctctgtctctttctcccttccttcctctctctcccttccctttccccttccccttccctttttcctaataaagctgtgttgcccagggcagacacaaactcctgggctcaagccatcctcccaccccaacctcccaagcagctgagactacaggcaccagccacaatccccgacttggttctttcacttgttatgctacccatctctctgtggggggcttaagtctacagggggatgcacctggagacaaactgaggaataattctcctcagcccaccctctccctaactctgatggcactcagtcacctgttccatggacagctaagagttttccctaggatgacctgagctggcctagctcttcctcaccctgcatgtgggcttcttgcagtctgccctgggctctttttttttttttttggagacggagtctcgctctgtcacccaggctggagtgcagtggtgcgatcttggatcactgcaacctccgcctcccgggttcaagcaattctcctgcctcagcctcccgagtagctgggactacaggtgcccaccaccacgcccggctacttttttgtattttagtagagacggggtttcgccgtgttgccctggctggtctcaaactcctgagctcagacaatctgcctgtctcggcctcccaaagtgttaggattacaggcgtgagccacggcgtctggcctcccctaggctctttacagaggctcctggcaggtctgaattcttcttaaactcaagctgggagcatcgctccatgtataacagtgataaagtggcaaatcaaaatgtctaacagtaagggattcgtgatatatcttatggtatatacatacagtggcgtaattggcagccattggtatttgaatactaaatgaaataggagaaaatgttcataataaatagttttgatttttttttttttttttttttttggctagggtctggctctgttgcccaggctggagtgcagtggtacgatcagggttcattgcaaccttgacctcctgggctcaagtgatcctcctgcctcagctacccgagtagctgggaccactggcatgtgccaccatgcctggctaatttttctgtagagatgggattttgctctgttgcccagcaagcagtccacccaccccggcctcccaaagtactgggattacaggcatgagccactgtgcccagcccataacgtattgttaaagcaggttttttgttgttttttttttgagacagaatcctctctgtcacccaggctggagtacagtggcatgatctcagctcaccacaacctccacctcccgggttcatgcgattcttctgcctcagcctcccaagtagctggaactacaggtgcatgccaccacgcctggctaatttttgtagctttagtagagacggggtttcaacatgttggccaggctggtcttgaacccctgacctcgtgatctgcccgcctcagcctcccaaagtgctatgattacaggcatgagccaccacacctggccaaagctggttttaaataggcactgtgtgatcccatttgaaatgtgtatacacatacacattatatatatatataaagagtagggctgggcacagtggatcatgtctgtaatccctgcactttgggaggtcgaggtgggtggatcacccgaggtcaggaggtcgagacaagcctggccaacatgatgaaaccccagctctactaaaaatacaaaaaattagccgggtgtggtggcggtgcctgtaatcccagctactcaggaggctgaggcaggagaatcacttgaacccaggaggcggaggttgcagtgagccgagattgcaccactgcactccagcttgggtgacaagagcaaaactccgtctcaaaaaaaaaaaaagagtagaaagatgtagcccaacatgttaacaaggattacctgtgattggtgggactgcaggtaattgttcttatttttattttctttttgatgcttttatgtttttcaagattttctgcaatgagcatgtgttatttacttttagaaaaagcatatattatttttataattagaaaaaaaaggctaaagtcattgaaaaatctatgcctcccaagatctagctggcctagccctaattctcagggacaggtgctgaaccactgtgaaaagccttcagttagggcttctgcagaggtggggctttgaggagacagggggtctggggcagggatctgagttggggtgtccaggaatttacaatcctcaccttggcctgtgccacttctttgctgttgagcacgaagaggacatcctgcgtatgaagcagagacaagggcagatccagaagggagatgtacttgcgcagcacattcacagactgaagcgtgagcacagagcaccctggatggagaggagacagggtgaagtgataagccttgaggcctccagccagattttcccctgagcatcctccctctaccctgtggctcagggcagggcaggacagtggccacagcattgccacgtgtttctgtggcactaaagctgccctgtgcccatgattcttgcagctagaacgagtaaaagggccatagaagacctggctggctaccctctaccctgcggtgtgccctaccagaaaaaggttggctgctagaggttgagatctggctacctcaaagccaaaggaagtaaaggagacaggaattactgtattgggagtttagagacctggttccagctctgtcagtcaagaattgacagacttggcaaagtcccttaaccactctcagtctcagttttctaatctgtaaattggtgttgatagtgtgagacctgcctgtctcacaggattgatataagaatcaaacaaactatagtcatgttccaaagtcatcatggcttggtaagctcctttcagtcatcccacatagaaagggcacaaactacttacgttttcattcattgaatcttcgtattgcgccggtgaggtatgacagaccagaaactggtccagagaggctaagcatgggggtcatgcagtaaatggtcaggtagggtcaaatactttatgtgggttaggaagagttcctaactcaggcagattggttcatcaagcacccagcagtcatttacaacctgcctaattggttgggggatgggattgagttcagactggaagaataccagaggtgtaaaacatccaccctgtgaaaaagctagacaggttgaggggcaaacctggcctccccactcatccagaggtggccctgcaggcaggcacttgctggtagatacaacctgccaggtaccttgaggtgagtcaggaagagtgtggcggcctccccaaccactgcctctgctcggctgagggcagctctctgtggatttgcaaatttccccctcataagtttctcagagggacagtatcttgtggccctttgcaaaaggaacaagccttacctttaggtaac

SEQ ID NO: 329 - DNA, 89 bp, Homo sapiens
aggaggcggaggctgcagtgagctgagatcacgccactgcacaccagcctgggtgacagagcgagactctgtctcaaaaaaaaaaaaaa

SEQ ID NO: 330 - DNA, 383 bp, Homo sapiens
cagagactcttgggagcaggggttaaacaagagaagttgagagacaattgacaaattcatggaactgactgcctggcagagcctgagaggtagaaaaacctgaaaaaggagccgggcgcggtggctcacgcctgtaaacccagcactttgggaggccgaggcaagcggatcacgaggtcaggagttcggcaccagcctggccaatatggtgaaactccgtctctaataaaaatacaaaaattaaccgggcgtggtggcatgcaccagtagttcccagctactcaggaggctgaggcaggaggcggaggctgcagtgagctgagatcacgccactgcacaccagcctgggtgacagagcgagactctgtcgcaaaaaaaaaaaa

SEQ ID NO: 331 - DNA, 8896 bp, Homo sapiens
aagttaagtaatatgcccgaggtacgttttcaatggaagaggctgactgagggtcacccaacttatatctcgaaatttcacaatttctacaagttctgtcctgggaggcaagagtaggtgaaacgagcacactctacgccaggcaaacaaacctcaacgcttagcctcccggcacctcctagggccggaagcttctcagcccaaagccgctgctggctgcaacctccgtcccgcagtccaattagcagccgcgacccggcgcccgcccacgccgcgtcacgagtcagccaaagatggctgcgcccaggtaatttgagcaaaggccacagtgaactccggcgtggctgaggaaggaggaggcacccacaggctgctgggaggagagcataaggtactggtattccgggggagggggtgaagtaaatgtcccggtgtcaggagaagcacgacgcggtgacacgctagctaccagcagcgctgcgcgtaaatgagagcaagtagaagtgtagttagctcttcctgctgtcttttcactttgcactctagaaggaaagaccttatatttaaattaactcagtagaaaggagaaatgcctgagattgaatttaatcccaggtttactgtcaatttacaaggtgaccacggccaaatttgattttcagaggtcccactttacttctctttcagataggccccacactgcctatctctcagagctcttccaagaatgacatgagataggtaacacaaaaatctttcgaaatatttgtagtttttacaggcggcgttgtctttgatagatatttgttattaatatcggagacaaaatgcccacaggggctgcccagtcagcacttatactgaattgagtgacttaattgccctcagtacaatatatacatactaaatttgattatatatttcaccaccccatacacaaaatcattcagagctcctgtacagcagagattgtgtcttatcatcttatcgtagccaaggccctcaaaaatttgactaccagaaacctagacataaatttctaaggctgctttgtacttattaggttagctttaagtctagagatatggaatgtcaaggtaatcaacatttccaaatgacctcttatcgatataaaacaggtagcaataaatatttaaacgagtgcctgtaatgttgtaggaaatgagaaaatctggtttcataaaagcatgttttcctttgttgttatccctgaactgtttttttttttttttttgtagaccgagtctcgctctcacccaggctggagtgcagtggcgagatctcggcacactgcaacctccacctcccaggttcaagcgattctcctgcctcagcctcccgagtagctgggattacaggcagctgccgccgtgcctggctaatttttgtatttttaaaagacagggagtttcaccatgttggccaggctggtctcgaactcctgacctcaggtgatccgtctgccttggcctcccaaggtgctgggattacaggcgtgagccactgcatccagcctttgtttttcttaactgttaccctgaaacctgagccaaatcttcatcattcaccattcccttcacattttcaccctaactagtgcagacatcaacaaactactggcatgtaggccatatgcagcctatagcttgccttggtacagccacccagctaagaatgatttttatgtttttatagtttttttaaaaacaaatattcaacaaaggctgtatgttacctgcaaagcctaccacatttacatctggccctttaaagtttgctgagccctgatctcaggtatacctagaaatgaaattgctagctatgtgtgtcttctatctgctaaataataccaaattctttcccaaagtgactgtacagtttgggtaaagctaccccacagaatgtacacagaatgtagttttagctaccccgcattcttgccaataattggaattgtcagattttgattttagctaacctatgggtacctattggtatctcactgtgggttgttcccccagttataatgaaggtgagcatattttcatgtttattggccatttaactttcctttttgtgaagtgcctgttcaaatattttgtcagtttttccgtagggctgcttacctttttcatgttgatatgtagttccatgtatgttctgggtactaactactcttttgtcagttctattgcattttctcccccactagcttatctttatggtatatgttgataaccataggttcttaacttcaatactgttagttttataagtcttttatgtttagtgctatttgtgaattgtttaggaaatactttcaaggattatgaagatattctgtatttcctaaaagctttatgtgttgcttttcatgttctggtttctgtttcacttagatttttttttaataatatgtatgcaatgatttttttcagattagctctacagtattatttttagtcttcagaaggtttttaaaattctttgtataaattcttgagaaatgatatcttcatgttttttaaggctcaaaatggaaaatcataaatccaataataaggaaaacataacaattgttgatatatccagaaaaattaaccagcttccagaagcagaaaggtaagatcccttcttaatttaaaaacaccttttatcaggtggattttcaccattgattcattatctcaagtttatctggtttgagtataaacaacatggaatgtgagaaggaaattgcccttttcttgcctggatgagagcgtttaaccattttgctcaacatcacatagctaattgtggaaggtgaggctggaactcatgtctttggacatacctaattgtataatgttttgagtttttccattaggcttggagtatagtaaaatgtaaacatttacagacccatttaaataacaaaactttaacttttaaaatgtcttttttttcccagttcattctgtcagtatgcttaccagtctaagagtaccatagaacacacatagcaagatagagaatgtcagagaaataggatcatggctaaagatctttaagatattattaaagagggccaggcatggtggctcacgccagtaatcccagcactttgggaggccagggtgggcagatcacctgaggtcaggagttcagaccagcctggccaacatggtgaaacctcatctctactaaaagtacaaaaattagctgggcgtggtggcaggtgcctgtaatcccagctacttgggaggctgaggcaggagaattgcttgaaccagggaggcggaggttgcagtgagccgagatcacaccactacaccccagcctgggcgacaagagtgaggatccgtctcaaaaaaaaaaaaaaaaaaaaaaagatattaaagagaaaaaccaatatagggaacatactaatctttgccaggcagctaatgtgtacttccacaaaatgtcttacactttgttgacagtcaagaaggtctctctgactataaaaggatgaaaagcagccacctgggaaggagagagggacagtgtcttaagtagagggaatggcatatgcctagccacaagatagccaaggcttgtggtacttgagtaaccattgttaccgaagtactaaggaagtgggagtaaggaccaggaatagttttgagcagggggatgatgttagcatttctaaagaacattccagctgctttttggaaagcagatttgaggtaggaaagaaaggaaacacaaataccagtagaaaaaatggcacagtaatcctggtgagtggagatggtaggggtggtgacagctgagatgaaaagaggatgcatttaaaatacattctggaagcataatcttgctatcttcaggaatagaaactgaacaaatccccatcttgctgccacttaccatcttaatcagggagaacccataaatcaagaccagtagtgttcagaacaaggatctccaaggggaagaaaaaaaaggccagtagtaagaacttggtgagatcttaaaagctctttcaccccccctccccacactccaactccactcccttctagttgttttcctgaggtaacggaaaaccttttaaagcaaaaaaggaactatgtccatgtttccaggccagcaagatagggaaagtgagaaagactaataaaagagtagtaggctgggcatggtggctcacacctgtaatcccagcactttgggaggcggaggcgggctggtcacctgaggtcaggagtttaagactagcctggccaacatggcgaaaccctatctctactaaaaatacaaaaattagccagatgtgggggcacgtgcctgtagtcctacccactggagaagctgaggcacgagaattgtttgaacctgggaggcggatgttgcatggagctgagatcatgccactgcactccagcctgggcgacagagcaagactgtctcaaaaaagagtagatggtggcagctttgaagagaagaaagcagtctgtcactgggttctttaccaaattagaaagaatacctggaactgcaaagtaaaatttagtttagaggcaataaatgtttcaatcattggcatctaaactaggcagattacagtgtcctgttatctttgccttgttcctattttttctcttcattcccattttattttctaagtttaaatcttcatttcttcttggattattaatcaggtatttaatggttacttggcatgtccttcagtgtatggagctttcttaatatcaaaaacttcattttctgatctacagcaatactttcacgtacatgtttgtcatttgttaaatttgggctatttcatgtctatttcttgtgtatgtcttatcaaaaagtcatgagtttttagttggtataggtacttttttggaaaactggcaaggggctgctaggtaacaattttgtgctaacttttaattaactaaacattttgaccttagctatgggaaaaatctggttgggagagagcaaagtttgctatgcagatttcacttgtactactttttatttatttgtatatgtaacatacttgtaaacaaatggacttatatataacatgtatatatgtattttatatatattatatatacatacaggcaaattgtttacctgagcattgggatttaaaatggggataatatacatttcacatgatttttatgatgaaatattttagaggaagtgttcaagttttttattccaacccccacaaaaaaaaaataggcttttcacatttacatggtttttgtggttggtaggttctccagactgtcatcactaattataatctatgtactccaagttcctgaactgccactgtcttgtaccaccattaccattttcatagacttctgttatatctcgtttacatctctttcttctccagtaatatttaactatgttaaccttgaagatagaaggtaattttttgtgcctttagcactaagtctgctgcatacagtggggttctcaatgagtgacaggcatcatgattgcaaagtgtcagataagaaaagcaataccttatacaacgtaggaagctgagttcctagaaaagctattttaagatgagtgtaagccatagaagttagaggaggtactctgtggctactttggctagttaagagtagtgaaaatcttaagactgtattgtagatggcaatgtaagtggtaaaaaagctaagtcgtagtctgaaaagtttggagtcagtattttcaatattcagcaatcatgttaggtattactttttcccaaaactaaagaatgcataggacataagttaaaagttcatacataacctggcttcaaatccagttctaccactacctgaaaacatcagtttatttctcatcaatgggttgttataaagtacctagcatagggtattgcttaaatgttaatactcccaatcctgacactaatgtttcagggaagagtgaaagaaatcacattaactccacattattgaacatcttctgtgtcaggctgaatacatctttgtatccattgtcttctggttgtttaaagactagtgtagaagcctgacatgtaaatcggtgattatataagatagtactgtcttgtaatgtgttgtgctagagaggttaagtattaattattatgggagctcaggagaggcacccactggctgctgggagaagagcaaaaacctatatataaagcaatttttaagattttggttctataagggatagatgtcgtatccagttagtgtattcccaaagtcctataacacatgtcaagatcgggaaagctcacacacacaataatgccaaagaaaagttctttcttctcaccctttcaggaatctacttgaaaatggatcggtttatgttggattaaatgctgctctttgtggcctcatagcaaacagtctttttcgacgcatcttgaatgtgacaaaggctcgcatagctgctggcttaccaatggcagggataccttttcttacaacagacttaacttacagatgttttgtaagttttcctttgaatacaggtaaattctacttcactatcaccaaagagtttgccttagtatatgttatttgcagctttagtccatacttattaatatcaagtagctgtatgctgtaatgcagttaagattaaatcttgctagcctatataatgtggcaaataattcatattagtatggtctaccaaccaagatgcacatacacagcagttctaaatactttttctttaattgagatggagttttgctcttgttgcccaggttggagtgccctggcgcaatcttggctcactgcaacctccaccttctgggttcaagcaattctcctgcctcagcctcctgagtagctgggattacaggtgcccaccaccatgcccggctaattttttgtatttttagtagagacagggtttcaccatgttggccaggctggtctcaaactcctgacctcaggtaatccacccgccttgtcttctcaaagtgctgggattacaggcgtgagccactgcacccggcaatacttccctttttctaacatatctttctcacagtgctcatttagagtaagaaatatttggaaatccatatatacatatatatgaaaattatatatatggaaatattatatatatacaaatgtatataaataatatgttggctaccttagattttttatttatattttatagagaagttccttaaagggggaaaatatttttatgggaataactctttatacagtaaatctcttaaagcactaaatgcatatacatttatcaaatacatggagatttgatttccttttgaaaatctaccatgtgtgctgaatactttgagtacagttaatcataaaaaaaacttttgattaattatttcaaataaaaatattaccatgggtgctagggaaggcagtccatctaaattttgttaagtgctgctccaaatttgtttaaatttgacgagtattttgttttaattcccatgcaccagtggaaacaatttctatgatcaaggaagacctatcgcccatttaattgaacagactgagtgaaaatattagcctaggtctgttgataaaaaacaaggcagaaagctagcagtagcccaaaccatgagattattatatctaagttgagaacaaattagagaactttttttcctaaaatagttttaccaattattcctagctattttaagttactcatagatgtaattataccttttaacaggctttgtacaattacatttgatatattacctgaaaaatacctgtgatacacaaaagaggatcttacattctttaaatcatgtttgcttgactatcatgaccttcatttctatgactaatttatttcctaggtgatttggattgtgaaacctgtaccataacacggagtggactgactggtcttgttattggtggtctataccctgttttcttggctatacctgtaaatggtggtctagcagccaggtaggaaataaaaaactttttataatatgtgattacctataaaactcacaacttaaagcagcaaatatattttgtttttaaggcatttagaccaaaggcaatgttaccctcttgattagaagttagcaagacctgttttttcttataatgaaattctacttatcaagaatttcaaacagttatacttggtgtgtagttaggctattaaccttaatttgtgtactgaatactaaactaactacaaagctgcaaacagtattatgcatgaaacttctatcatataaacaattatcttggatgagtttgaacacttgcactaaaggaaaattccatcagaaaatgtctagctgttatattagccttctattctaaaataattctggctattctctgttgaactcttgcatcagcaatctatgctatagccttgaagcaaactggataaagaaacaaaagtttttaggattaatagacactgaagacctttactttaatattcagttttatcttaagacttctaggactaatatgtatcacagatgggtttgccatttgatgcaacaatcttttctattgaactatctcaatgttttcttacaggtatcaatcagctctgttaccacacaaagggaacatcttaagttactggattagaacttctaagcctgtctttagaaagatgttatttcctattttgctccagactatgttttcagcataccttgggtctgaacaatataaactacttataaaggcccttcagttatctgaacctggcaaagaaattcactgattttaaacaaatatgtaaacaaaaataaaatggtaaaaacagtttatgtctaatgttatgtctaatgttatgcataaacatagacttgtaa

SEQ ID NO: 332 - DNA, 8895 bp, Homo sapiens
aagttaagtaatatgcccgaggtacgttttcaatggaagaggctgactgagggtcacccaacttatatctcgaaatttcacaatttctacaagttctgtcctgggaggcaagagtaggtgaaacgagcacactctacgccaggcaaacaaacctcaacgcttagcctcccggcacctcctagggccggaagcttctcagcccaaagccgctgctggctgcaacctccgtcccgcagtccaattagcagccgcgacccggcgcccgcccacgccgcgtcacgagtcagccaaagatggctgcgcccaggtaatttgagcaaaggccacagtgaactccggcgtggctgaggaaggaggaggcacccacaggctgctgggaggagagcataaggtactggtattccgggggagggggtgaagtaaatgtcccggtgtcaggagaagcacgacgcggtgacacgctagctaccagcagcgctgcgcgtaaatgagagcaagtagaagtgtagttagctcttcctgctgtcttttcactttgcactctagaaggaaagaccttatatttaaattaactcagtagaaaggagaaatgcctgagattgaatttaatcccaggtttactgtcaatttacaaggtgaccacggccaaatttgattttcagaggtcccactttacttctctttcagataggccccacactgcctatctctcagagctcttccaagaatgacatgagataggtaacacaaaaatctttcgaaatatttgtagtttttacaggcggcgttgtctttgatagatatttgttattaatatcggagacaaaatgcccacaggggctgcccagtcagcacttatactgaattgagtgacttaattgccctcagtacaatatatacatactaaatttgattatatatttcaccaccccatacacaaaatcattcagagctcctgtacagcagagattgtgtcttatcatcttatcgtagccaaggccctcaaaaatttgactaccagaaacctagacataaatttctaaggctgctttgtacttattaggttagctttaagtctagagatatggaatgtcaaggtaatcaacatttccaaatgacctcttatcgatataaaacaggtagcaataaatatttaaacgagtgcctgtaatgttgtaggaaatgagaaaatctggtttcataaaagcatgttttcctttgttgttatccctgaactgtttttttttttttttttgtagaccgagtctcgctctcacccaggctggagtgcagtggcgagatctcggcacactgcaacctccacctcccaggttcaagcgattctcctgcctcagcctcccgagtagctgggattacaggcagctgccgccgtgcctggctaatttttgtatttttaaaagacagggagtttcaccatgttggccaggctggtctcgaactcctgacctcaggtgatccgtctgccttggcctcccaaggtgctgggattacaggcgtgagccactgcatccagcctttgtttttcttaactgttaccctgaaacctgagccaaatcttcatcattcaccattcccttcacattttcaccctaactagtgcagacatcaacaaactactggcatgtaggccatatgcagcctatagcttgccttggtacagccacccagctaagaatgatttttatgtttttatagtttttttaaaaacaaatattcaacaaaggctgtatgttacctgcaaagcctaccacatttacatctggccctttaaagtttgctgagccctgatctcaggtatacctagaaatgaaattgctagctatgtgtgtcttctatctgctaaataataccaaattctttcccaaagtgactgtacagtttgggtaaagctaccccacagaatgtacacagaatgtagttttagctaccccgcattcttgccaataattggaattgtcagattttgattttagctaacctatgggtacctattggtatctcactgtgggttgttcccccagttataatgaaggtgagcatattttcatgtttattggccatttaactttcctttttgtgaagtgcctgttcaaatattttgtcagtttttccgtagggctgcttacctttttcatgttgatatgtagttccatgtatgttctgggtactaactactcttttgtcagttctattgcattttctcccccactagcttatctttatggtatatgttgataaccataggttcttaacttcaatactgttagttttataagtcttttatgtttagtgctatttgtgaattgtttaggaaatactttcaaggattatgaagatattctgtatttcctaaaagctttatgtgttgcttttcatgttctggtttctgtttcacttagatttttttttaataatatgtatgcaatgatttttttcagattagctctacagtattatttttagtcttcagaaggtttttaaaattctttgtataaattcttgagaaatgatatcttcatgttttttaaggctcaaaatggaaaatcataaatccaataataaggaaaacataacaattgttgatatatccagaaaaattaaccagcttccagaagcagaaaggtaagatcccttcttaatttaaaaacaccttttatcaggtggattttcaccattgattcattatctcaagtttatctggtttgagtataaacaacatggaatgtgagaaggaaattgcccttttcttgcctggatgagagcgtttaaccattttgctcaacatcacatagctaattgtggaaggtgaggctggaactcatgtctttggacatacctaattgtataatgttttgagtttttccattaggcttggagtatagtaaaatgtaaacatttacagacccatttaaataacaaaactttaacttttaaaatgtcttttttttcccagttcattctgtcagtatgcttaccagtctaagagtaccatagaacacacatagcaagatagagaatgtcagagaaataggatcatggctaaagatctttaagatattattaaagagggccaggcatggtggctcacgccagtaatcccagcactttgggaggccagggtgggcagatcacctgaggtcaggagttcagaccagcctggccaacatggtgaaacctcatctctactaaaagtacaaaaattagctgggcgtggtggcaggtgcctgtaatcccagctacttgggaggctgaggcaggagaattgcttgaaccagggaggcggaggttgcagtgagccgagatcacaccactacaccccagcctgggcgacaagagtgaggatccgtctcaaaaaaaaaaaaaaaaaaaaaaagattttaaagagaaaaaccaatatagggaacatactaatctttgccaggcagctaatgtgtacttccacaaaatgtcttacactttgttgacagtcaagaaggtctctctgactataaaaggatgaaaagcagccacctgggaaggagagagggacagtgtcttaagtagagggaatggcatatgcctagccacaagatagccaaggcttgtggtacttgagtaaccattgttaccgaagtactaaggaagtgggagtaaggaccaggaatagttttgagcagggggatgatgttagcatttctaaagaacattccagctgctttttggaaagcagatttgaggtaggaaagaaaggaaacacaaataccagtagaaaaaatggcacagtaatcctggtgagtggagatggtaggggtggtgacagctgagatgaaaagaggatgcatttaaaatacattctggaagcataatcttgctatcttcaggaatagaaactgaacaaatccccatcttgctgccacttaccatcttaatcagggagaacccataaatcaagaccagtagtgttcagaacaaggatctccaaggggaagaaaaaaaaggccagtagtaagaacttggtgagatcttaaaagctctttcaccccccctccccacactccaactccactcccttctagttgttttcctgaggtaacggaaaaccttttaaagcaaaaaaggaactatgtccatgtttccaggccagcaagatagggaaagtgagaaagactaataaaagagtagtaggctgggcatggtggctcacacctgtaatcccagcactttgggaggcggaggcgggctggtcacctgaggtcaggagtttaagactagcctggccaacatggcgaaaccctatctctactaaaaatacaaaaattagccagatgtgggggcacgtgcctgtagtcctacccactggagaagctgaggcacgagaattgtttgaacctgggaggcggatgttgcatggagctgagatcatgccactgcactccagcctgggcgacagagcaagactgtctcaaaaaagagtagatggtggcagctttgaagagaagaaagcagtctgtcactgggttctttaccaaattagaaagaatacctggaactgcaaagtaaaatttagtttagaggcaataaatgtttcaatcattggcatctaaactaggcagattacagtgtcctgttatctttgccttgttcctattttttctcttcattcccattttattttctaagtttaaatcttcatttcttcttggattattaatcaggtatttaatggttacttggcatgtccttcagtgtatggagctttcttaatatcaaaaacttcattttctgatctacagcaatactttcacgtacatgtttgtcatttgttaaatttgggctatttcatgtctatttcttgtgtatgtcttatcaaaaagtcatgagtttttagttggtataggtacttttttggaaaactggcaaggggctgctaggtaacaattttgtgctaacttttaattaactaaacattttgaccttagctatgggaaaaatctggttgggagagagcaaagtttgctatgcagatttcacttgtactactttttatttatttgtatatgtaacatacttgtaaacaaatggacttatatataacatgtatatatgtattttatatatattatatatacatacaggcaaattgtttacctgagcattgggatttaaaatggggataatatacatttcacatgatttttatgatgaaatattttagaggaagtgttcaagttttttattccaacccccacaaaaaaaaaataggcttttcacatttacatggtttttgtggttggtaggttctccagactgtcatcactaattataatctatgtactccaagttcctgaactgccactgtcttgtaccaccattaccattttcatagacttctgttatatctcgtttacatctctttcttctccagtaatatttaactatgttaaccttgaagatagaaggtaattttttgtgcctttagcactaagtctgctgcatacagtggggttctcaatgagtgacaggcatcatgattgcaaagtgtcagataagaaaagcaataccttatacaacgtaggaagctgagttcctagaaaagctattttaagatgagtgtaagccatagaagttagaggaggtactctgtggctactttggctagttaagagtagtgaaaatcttaagactgtattgtagatggcaatgtaagtggtaaaaaagctaagtcgtagtctgaaaagtttggagtcagtattttcaatattcagcaatcatgttaggtattactttttcccaaaactaaagaatgcataggacataagttaaaagttcatacataacctggcttcaaatccagttctaccactacctgaaaacatcagtttatttctcatcaatgggttgttataaagtacctagcatagggtattgcttaaatgttaatactcccaatcctgacactaatgtttcagggaagagtgaaagaaatcacattaactccacattattgaacatcttctgtgtcaggctgaatacatctttgtatccattgtcttctggttgtttaaagactagtgtagaagcctgacatgtaaatcggtgattatataagatagtactgtcttgtaatgtgttgtgctagagaggttaagtattaattattatgggagctcaggagaggcacccactggctgctgggagaagagcaaaaacctatatataaagcaatttttaagattttggttctataagggatagatgtcgtatccagttagtgtattcccaaagtcctataacacatgtcaagatcgggaaagctcacacacacaataatgccaaagaaaagttctttcttctcaccctttcaggaatctacttgaaaatggatcggtttatgttggattaaatgctgctctttgtggcctcatagcaaacagtctttttcgacgcatcttgaatgtgacaaaggctcgcatagctgctggcttaccaatggcagggataccttttcttacaacagacttaacttacagatgttttgtaagttttcctttgaatacaggtaaattctacttcactatcaccaaagagtttgccttagtatatgttatttgcagctttagtccatacttattaatatcaagtagctgtatgctgtaatgcagttaagattaaatcttgctagcctatataatgtggcaaataattcatattagtatggtctaccaaccaagatgcacatacacagcagttctaaatactttttctttaattgagatggagttttgctcttgttgcccaggttggagtgccctggcgcaatcttggctcactgcaacctccaccttctgggttcaagcaattctcctgcctcagcctcctcagtagctgggattacaggtgcccaccaccatgcccggctaattttttgtatttttagtagagacagggtttcaccatgttggccaggctggtctcaaactcctgacctcaggtaatccacccgccttgtcttctcaaagtgctgggattacaggcgtgagccactgcacccggcaatacttccctttttctaacatatctttctcacagtgctcatttagagtaagaaatatttggaaatccatatatacatatatatgaaaattatatatatggaaatattatatatatacaaatgtatataaataatatgttggctaccttagattttttatttatattttatagagaagttccttaaagggggaaaatatttttatgggaataactctttatacagtaaatctcttaaagcactaaatgcatatacatttatcaaatacatggagatttgatttccttttgaaaatctaccatgtgtgctgaatactttgagtacagttaatcataaaaaaaacttttgattaattatttcaaataaaaatattaccatgggtgctagggaaggcagtccatctaaattttgttaagtgctgctccaaatttgtttaaatttgacgagtattttgttttaattcccatgaccagtggaaacaatttctatgatcaaggaagacctatcgcccatttaattgaacagactgagtgaaaatattagcctaggtctgttgataaaaaacaaggcagaaagctagcagtagcccaaaccatgagattattatatctaagttgagaacaaattagagaactttttttcctaaaatagttttaccaattattcctagctattttaagttactcatagatgtaattataccttttaacaggctttgtacaattacatttgatatattacctgaaaaatacctgtgatacacaaaagaggatcttacattctttaaatcatgtttgcttgactatcatgaccttcatttctatgactaatttatttcctaggtgatttggattgtgaaacctgtaccataacacggagtggactgactggtcttgttattggtggtctataccctgttttcttggctatacctgtaaatggtggtctagcagccaggtaggaaataaaaaactttttataatatgtgattacctataaaactcacaacttaaagcagcaaatatattttgtttttaaggcatttagaccaaaggcaatgttaccctcttgattagaagttagcaagacctgttttttcttataatgaaattctacttatcaagaatttcaaacagttatacttggtgtgtagttaggctattaaccttaatttgtgtactgaatactaaactaactacaaagctgcaaacagtattatgcatgaaacttctatcatataaacaattatcttggatgagtttgaacacttgcactaaaggaaaattccatcagaaaatgtctagctgttatattagccttctattctaaaataattctggctattctctgttgaactcttgcatcagcaatctatgctatagccttgaagcaaactggataaagaaacaaaagtttttaggattaatagacactgaagacctttactttaatattcagttttatcttaagacttctaggactaatatgtatcacagatgggtttgccatttgatgcaacaatcttttctattgaactatctcaatgttttcttacaggtatcaatcagctctgttaccacacaaagggaacatcttaagttactggattagaacttctaagcctgtctttagaaagatgttatttcctattttgctccagactatgttttcagcataccttgggtctgaacaatataaactacttataaaggcccttcagttatctgaacctggcaaagaaattcactgattttaaacaaatatgtaaacaaaaataaaatggtaaaaacagtttatgtctaatgttatgtctaatgttatgcataaacatagacttgtaa

SEQ ID NO: 333 - DNA, 7569 bp, Homo sapiens
ttatgctacttaaaattataatttagaaaaggcatctttgtgagtgaaactggcctttagcttctgtttaaagaaaaacataaagctgtgctgccaaagatgaaaaactcatgtgaaattaataaaatacaatctcaatttttcagaaagcaaagatgatttgttctttcaacaggcacataaaatatattatctaccaaacttatataaaaaatgatcccagttatgaggcaaaagaatctatgtgcacaagagactgaaaggaagcatgccaaaatgtttactgtggatattctatggcttatagagttataagggtgatttttcttttcttcttgattcctttcaggatattccaagttttctataaagaatatgctttacttttacaactagggaaagaaagacagaaaaatatatataacatttaaagggcaaaacaatatagctgtttattttacaggctaaaatatcaagatgaaaagctctgatcccaaatcatccattttacctatattctgtcacttttactaaaagcagagttctactcatcccagtgaaaaaaacaatgaattaaaagtaatttctggcgttaacccaagtaccgagttaagactccttaagaatatagaattatgtaatcaacttagataattcaaagcccaatgatataactaagttctttgacgattgagcacacattgtttccttacttatctttaaacattcctagtccaattactccctagcataataccatttataaatgaggatgagtttacaatggtttctgtaaccaaaaagtatttctaatatctgtcctctgccacatatttttaaattatcttttccattagcagaaatgggcaacataagcaataaatcatgttaagtctgttgctacaaatttactttgccaaaatttttgttcagagggcagatatctgcattatttaaggacatttagtcatttgtagctaacacctgaagtaaactaccctcaatcaatttttatatttcagtctagtcactgtagacaaactatttaaatcttttataatttactttgtgtagttatttggcttaaaaaaaaaaaaagagggctcacattctatttaaattaagacaatatattttataaagcccaaattatagtacactaagagccagaggggtctagggaattgatctcagtgggtatacagcaaagacaaaatttggaggcagacgctaaaggaagttgagataaataaaattcaaatcagtgtattaacagaactacacaaatgtttacaacacagtaactacacttttcaattagttcattgtgaaaactgagcaaaatattttcaacaattttgggtcaacaaaaagtatggaatattttaagacaataaagagtgactggtgttgagagtactgaggctacacagaggtactgaaattcaaatctgaaaaatactgtgctggccacacaacactacaaatttctaatggaagaattccctttttgatccgcagcttaggtggtaagtaaataaaaaaacagctcagaaaaacagcaaaaatattaacatttaggagtctcaaaactttgtattggctgtgagtctgggggaaaaaaacataaatgtcatactaccaattaaactttcaagagtcatcagattatttagctttaaaattttactaaatcagaccttaaactacacattcaaaatgctgaactagataatcacatattaaaaaggtaatgactcattatcagtgaattacccagtctgttctatcaaagtagtagttaaggtcaccaaataatgttggtgcctttggttctggaattataactagctgtactgtaggagcatcagcgcctaagttttaagccagtgggaatactctgctgcctggcttcacaggcactgaatacacttaaaatggtaagaaactgaatggatttaataagttttgaataatacaataaccaactgtatatttattatgaagtaaaagccaatctcctacccaatccctcttctatcagctgcacatttccaagtaagtgagataaaatgactcaatctaaaccacgtgaaggaatgtattaacataatccaacaaaaatgaaataaaacaatccagagttttgagtgttttttcacacttgtaataaactgaaaaaatatttcaattaaaacaaccatatgccacaaaaagccactcccatcatccacaatactaaagtccttatacaacactagataaatttttatataaaacagtagaaactagcataccattaattagaaacctcaaaatattcagaaaacagtatcaagtactcaagagaaagctcaagaagccaaaacctcaagaatccatacatcctggttgttaccctaaattgtaattaactacccacacatttaatcataatcaactttttcaaagatatacaaatcaatgcatctatttaaaaggactactctttatagttcagaactttacattaacttttatattctactcagcagggtgtctgtctgtactccaaattagctctcatgttccaggaaataaatacaaactcatatgccttgtgatcactgatggcctgcttatgtaattctagtccactaaatgttaattccatagaatatgctcttgattatgtaaaaactctaatttcttgatgaaatactgtaattctccaaaggttacaattttgtaaagatatgcaataactgagtatcactcccatgaaagacaaaaaaagtataattttgttccaagattaacttagtctcatgtatctctattaagtctttcaaggattccagagaatcttttcatatctccatttctggaaagtgaaatcagtatagaagtaatttgggaacttgaaaatggcattcatttttttcagcagatgccaaatttttgaccgacatggttctcacaattactttgttaccaacagtccagtcagttaacaggttgtaggaaaagattcgtttttgcagacactgctaagctgttcaaagagaagagagagagattaatttagtgattataaaatgcacaaatatttaaaatattttgaacacttcttgttggattatatcagaggtgtgactacattttaacaaaagtggactttttaagataagtctggtcaaagaagtgcagaaacagtaagtcaatatgatagaaatagtaggtcaaaatatgatgtgttagttcaattaatgtatgaactcctgccaccatcaaaagacaaatattaaaaagctacatctttagtctagttctgtattttaccagaggcacatttagaagaaaaacaaaagggtcacccaaatactaaattgttttcaaccattacagtaaatagagccaaacctagaaatttcaaaaacaatccattttatattccagaaatctcctttatccatgtgctaatcatccagaacacaattttctaaaaatagtaagacaacagtttcacattaatcataacttttttaattaacaagtagtgaatcggacactttaagatattgtttactacatactgaaataaacagatctgtttaaattcagaaacccaaacatttacagtaaaatgtgcttacacataaatatgaccaaatttatttaaagcccctattagatagatcctaagtacatgcaattaccatgtaaaaacaagaccatgaagttgatgtaaaaaatgacaaaatcactaagtcaccaaaactagaaaaaaaaaaatgaaatggaaactgagaaaagacagttaataaaacataaggaacctaacaaagcagctttaaaaataggccatactaatccttccattttcaaaagttcttatcaagtaattccaaaaactgccatttataaaatgacattctaaaaatctacacttggaatttcaaagtatctcaattcagaaagctttgactactgtttctccccagcccacaatttcaaataatgcaggaaaagtattgacgtaaggaagaaaatactccaacagaatgttatagtttttagaaaaatgaacttactgctttccagaaccttttaagacccacagtcagcattaacaatcatttttcctattttcatccattattttccaatatcatgttagagatgaataaattctttgagcccataactaaaagatcaacaaacctggttttattatgacaccatatttttgtcattggtactgcacaaaattatatacaaagaaatatatacaaaatgttcaagtattagttaaatttcaattcaaggcttctgtttcaaaaaagctacatttaacatatttcataaagatagcacaaattagtcatttcaaataatctttccaactacttttggtttatatatatatatatatatgtatatatatatataattcagtaggcactaaaaacccatgcagctgcattgtgaggggcttgctcctgcccttaggtataagcaggttcatcactccaatttgtgagtttggctactacccattcatgctcaagtgcagtagtagatgattttacaaaatatgctgtgatgcactggaaaccaaagaccaattcaggtctcaaatcgtattatctagcaacaaaacatttacagttgtgcaagaacaaggattccattttcataaccaaataacaaaataaaacattttatgtgtaagataacttacatctttggactgctggaaaatactttttaattatgaacatgttaaaaataaaaaacagcagaagccctgatattacctctttttcctcatttcttatactaccttttaaaataaagcaggaaatgtggccagcagctggtcccgtctcttctgccccaacagctgtatccactttagcacaaagaaaaacaaggatgctaaatacgtatatactttatcaagcagtgatgtttcacaaagaatttcttaatgcctcttacactgaaggacaccataattcaatttatacaactggttaatagattcaagggaataaatcccaccttaggaaaatagtaccaatcgtgtcatttaagtggccagaaccactcaatttaaaaaattattttaaaataggacaaatacttttgaaacacagagaataagattctttgtgaagcctcactttacacgttttcattcacatttcacaaccttcaatatctaatcatacatatataaatttaacctaaaattttaatacaacaaaaataaagatgttcaacaatttattcaatctcagtgatagggtaatcactgctggtcctcaaagaaacattagccattcttattctccaattaactaaaacgcaggagtctcatatgtatgttaatttccaacttctctaatggtgagacattaaaatgttactccattatagactgtttctatatctcatactgaaaactaaaaggcattgttgatatttaagagatacctgtcacctccagcaaaataactatcacatttgtgcatgccccaaatacttaactgtcaacctctgaaaagttgccctaaaatcggaattccaatttgcaccttgtacaactcggaacttccattcaacttcacctgtttcactgtctccaaactgtctctctataagcaggtttcagtgtacagttggaaccgatgtcatccaaggccatgtccacactggggacagaagagctaggtacacgcaagtctgaataaggggacacattaatagctatttcaaccagaagaggcatcttaaatacattcttgaccagcacaagtctgtttccagggtggacagggcccaaattagatttccctcccacctaccaaaacagaaaaaaaaaaaaaaatctcacacacacaaactgatatgttgcccattaaagtagacaaagcagcatagcatgagcgttacgggaagagatggatccttaccaggttgtgaggcgggaacgactgttctgtaacccctacaacggagcctggcaggaaggaaatcacctaaaaaagaaactgtcagagagatttaatagtcacatgttatcattaggagttggttactgtgtcacattcatgcttttagctaaacactttaagattcaatattactttttttctctcctctgaaatgtgtccggtgaagatgtcccactaaggtaagtttgacatggtgtaagggagttgaaaggggtaaacgcggataaagagcagattacttgaccctacattttaagagaagacgacgccttccgggcgcacgccgagcagaactccaccgacaccttatccttgtccacatggagacagactcctcccgccgagtcgtcctcttccagcaggtcctgcttctgctttcccaccggcagagcgtagtcgtggtcaccggcgggcgagtctctgaagagcgaggtggtcagccgcagtcccacgccgctcagccggctcagcaagcgagccagtccagtctcgttggctaagactgcccgtaggtagcgactctcctcctgcagtgcctgtacgcgtttgcccagctcccgattctcggcccgcagctcctggttctcggctgccagaccccggactcgactctccagccccatcacgtactccttcttcttcagtcgattaaggcgggcagcggccgccgccgccttccggggactctttgtcgccgcctggttgttgtcgttaccgctgccgccaccgccgcctcctcctggggactttctccgcctcttttcggcgctgccactgtcactgctgctgctgcagcctccgataccgtttaacagcctttgcagcaggtcagagaagcgctgcatttcagcagccgcggcctcatcgtcatcgtcccctctccacaggccgccgctatccgagcctccgccagacgaggagagaggccccggcgagctaagcccggggtccaggtgccagtccggttgcctggggtccaggagatccgccagttccagcccagacagaaagtccatatcctccgtctcttcccccgggaggctggcgatcgcctcctcctccatctcctcgggggagggcgcgcgcacggccacgccgccgcggctccccctcccggcttccaactctccttcgtcgccaaactgctgcttgcggccgggagatccggccgccgccgtctcctcctcccccgctgcagcccgggtcaggtcagagggcagcgaacaagttgcagccggctccgggctctcactgcgggttggggagttgctgcccgaggctgccagcagcttggtcaggctatgcctcatgagggccagcggcgggccgcggtaggccccggccgctaagagtgggcctcacgggccccaaggatcccaggccccagggcgggtagcccccggcactggccgaaacgaaatgcagggaaaggtccgagtcgcctcccgcctcacttggctagtcgaccccccgcgccaaggcgcggggagggacgggagaacgaagcggtgaggccctgcgatgactcgaccgcgccacccagacaacggcgtagccggaagtcagt

SEQ ID NO: 334 - DNA, 7569 bp, Homo sapiens
ttatgctacttaaaattataatttagaaaaggcatctttgtgagtgaaactggcctttagcttctgtttaaagaaaaacataaagctgtgctgccaaagatgaaaaactcatgtgaaattaataaaatacaatctcaatttttcagaaagcaaagatgatttgttctttcaacaggcacataaaatatattatctaccaaacttatataaaaaatgatcccagttatgaggcaaaagaatctatgtgcacaagagactgaaaggaagcatgccaaaatgtttactgtggatattctatggcttatagagttataagggtgatttttcttttcttcttgattcctttcaggatattccaagttttctataaagaatatgctttacttttacaactagggaaagaaagacagaaaaatatatataacatttaaagggcaaaacaatatagctgtttattttacaggctaaaatatcaagatgaaaagctctgatcccaaatcatccattttacctatattctgtcacttttactaaaagcagagttctactcatcccagtgaaaaaaacaatgaattaaaagtaatttctggcgttaacccaagtaccgagttaagactccttaagaatatagaattatgtaatcaacttagataattcaaagcccaatgatataactaagttctttgacgattgagcacacattgtttccttacttatctttaaacattcctagtccaattactccctagcataataccatttataaatgaggatgagtttacaatggtttctgtaaccaaaaagtatttctaatatctgtcctctgccacatatttttaaattatcttttccattagcagaaatgggcaacataagcaataaatcatgttaagtctgttgctacaaatttactttgccaaaatttttgttcagagggcagatatctgcattatttaaggacatttagtcatttgtagctaacacctgaagtaaactaccctcaatcaatttttatatttcagtctagtcactgtagacaaactatttaaatcttttataatttactttgtgtagttatttggcttaaaaaaaaaaaaagagggctcacattctatttaaattaagacaatatattttataaagcccaaattatagtacactaagagccagaggggtctagggaattgatctcagtgggtatacagcaaagacaaaatttggaggcagacgctaaaggaagttgagataaataaaattcaaatcagtgtattaacagaactacacaaatgtttacaacacagtaactacacttttcaattagttcattgtgaaaactgagcaaaatattttcaacaattttgggtcaacaaaaagtatggaatattttaagacaataaagagtgactggtgttgagagtactgaggctacacagaggtactgaaattcaaatctgaaaaatactgtgctggccacacaacactacaaatttctaatggaagaattccctttttgatccgcagcttaggtggtaagtaaataaaaaaacagctcagaaaaacagcaaaaatattaacatttaggagtctcaaaactttgtattggctgtgagtctgggggaaaaaaacataaatgtcatactaccaattaaactttcaagagtcatcagattatttagctttaaaattttactaaatcagaccttaaactacacattcaaaatgctgaactagataatcacatattaaaaaggtaatgactcattatcagtgaattacccagtctgttctatcaaagtagtagttaaggtcaccaaataatgttggtgcctttggttctggaattataactagctgtactgtaggagcatcagcgcctaagttttaagccagtgggaatactctgctgcctggcttcacaggcactgaatacacttaaaatggtaagaaactgaatggatttaataagttttgaataatacaataaccaactgtatatttattatgaagtaaaagccaatctcctacccaatccctcttctatcagctgcacatttccaagtaagtgagataaaatgactcaatctaaaccacgtgaaggaatgtattaacataatccaacaaaaatgaaataaaacaatccagagttttgagtgttttttcacacttgtaataaactgaaaaaatatttcaattaaaacaaccatatgccacaaaaagccactcccatcatccacaatactaaagtccttatacaacactagataaatttttatataaaacagtagaaactagcataccattaattagaaacctcaaaatattcagaaaacagtatcaagtactcaagagaaagctcaagaagccaaaacctcaagaatccatacatcctggttgttaccctaaattgtaattaactacccacacatttaatcataatcaactttttcaaagatatacaaatcaatgcatctatttaaaaggactactctttatagttcagaactttacattaacttttatattctactcagcagggtgtctgtctgtactccaaattagctctcatgttccaggaaataaatacaaactcatatgccttgtgatcactgatggcctgcttatgtaattctagtccactaaatgttaattccatagaatatgctcttgattatgtaaaaactctaatttcttgatgaaatactgtaattctccaaaggttacaattttgtaaagatatgcaataactgagtatcactcccatgaaagacaaaaaaagtataattttgttccaagattaacttagtctcatgtatctctattaagtctttcaaggattccagagaatcttttcatatctccatttctggaaagtgaaatcagtatagaagtaatttgggaacttgaaaatggcattcatttttttcagcagatgccaaatttttgaccgacatggttctcacaattactttgttaccaacagtccagtcagttaacaggttgtaggaaaagattcgtttttgcagacactgctaagctgttcaaagagaagagagagagattaatttagtgattataaaatgcacaaatatttaaaatattttgaacacttcttgttggattatatcagaggtgtgactacattttaacaaaagtggactttttaagataagtctggtcaaagaagtgcagaaacagtaagtcaatatgatagaaatagtaggtcaaaatatgatgtgttagttcaattaatgtatgaactcctgccaccatcaaaagacaaatattaaaaagctacatctttagtctagttctgtattttaccagaggcacatttagaagaaaaacaaaagggtcacccaaatactaaattgttttcaaccattacagtaaatagagccaaacctagaaatttcaaaaacaatccattttatattccagaaatctcctttatccatgtgctaatcatccagaacacaattttctaaaaatagtaagacaacagtttcacattaatcataacttttttaattaacaagtagtgaatcggacactttaagatattgtttactacatactgaaataaacagatctgtttaaattcagaaacccaaacatttacagtaaaatgtgcttacacataaatatgaccaaatttatttaaagcccctattagatagatcctaagtacatgcaattaccatgtaaaaacaagaccatgaagttgatgtaaaaaatgacaaaatcactaagtcaccaaaactagaaaaaaaaaaatgaaatggaaactgagaaaagacagttaataaaacataaggaacctaacaaagcagctttaaaaataggccatactaatccttccattttcaaaagttcttatcaagtaattccaaaaactgccatttataaaatgacattctaaaaatctacacttggaatttcaaagtatctcaattcagaaagctttgactactgtttctccccagcccacaatttcaaataatgcaggaaaagtattgacgtaaggaagaaaatactccaacagaatgttatagtttttagaaaaatgaacttactgctttccagaaccttttaagacccacagtcagcattaacaatcatttttcctattttcatccattattttccaatatcatgttagagatgaataaattctttgagcccataactaaaagatcaacaaacctggttttattatgacaccatatttttgtcattggtactgcacaaaattatatacaaagaaatatatacaaaatgttcaagtattagttaaatttcaattcaaggcttctgtttcaaaaaagctacatttaacatatttcataaagatagcacaaattagtcatttcaaataatctttccaactacttttggtttatatatatatatatatatgtatatatatatataattcagtaggcactaaaaacccatgcagctgcattgtgaggggcttgctcctgcccttaggtataagcaggttcatcactccaatttgtgagtttggctactacccattcatgctcaagtgcagtagtagatgattttacaaaatatgctgtgatgcactggaaaccaaagaccaattcaggtctcaaatcgtattatctagcaacaaaacatttacagttgtgcaagaacaaggattccattttcataaccaaataacaaaataaaacattttatgtgtaagataacttacatctttggactgctggaaaatactttttaattatgaacatgttaaaaataaaaaacagcagaagccctgatattacctctttttcctcatttcttatactaccttttaaaataaagcaggaaatgtggccagcagctggtcccgtctcttctgccccaacagctgtatccactttagcacaaagaaaaacaaggatgctaaatacgtatatactttatcaagcagtgatgtttcacaaagaatttcttaatgcctcttacactgaaggacaccataattcaatttatacaactggttaatagattcaagggaataaatcccaccttaggaaaatagtaccaatcgtgtcatttaagtggccagaaccactcaatttaaaaaattattttaaaataggacaaatacttttgaaacacagagaataagattctttgtgaagcctcactttacacgttttcattcacatttcacaaccttcaatatctaatcatacatatataaatttaacctaaaattttaatacaacaaaaataaagatgttcaacaatttattcaatctcagtgatagggtaatcactgctggtcctcaaagaaacattagccattcttattctccaattaactaaaacgcaggagtctcatatgtatgttaatttccaacttctctaatggtgagacattaaaatgttactccattatagactgtttctatatctcatactgaaaactaaaaggcattgttgatatttaagagatacctgtcacctccagcaaaataactatcacatttgtgcatgccccaaatacttaactgtcaacctctgaaaagttgccctaaaatcggaattccaatttgcaccttgtacaactcggaacttccattcaacttcacctgtttcactgtctccaaactgtctctctataagcaggtttcagtgtacagttggaaccgatgtcatccaaggccatgtccacactggggacagaagagctaggtacacgcaagtctgaataaggggacacattaatagctatttcaaccagaagaggcatcttaaatacattcttgaccagcacaagtctgtttccagggtggacagggcccaaattagatttccctcccaccttccaaaacagaaaaaaaaaaaaaaatcacacacacacaaactgagatgttgcccattaaagtagacaaagcagcagagcatgagcgttacgggaagagatggatccttaccaggttgtgaggcgggaacgactgttctgtaacccctacaacggagcctggcaggaaggaaatcacctaaaaaagaaactgtcagagagatttaatagtcacatgttatcattaggagttggttactgtgtcacattcatgcttttagctaaacactttaagattcaatattactttttttctctcctctgaaatgtgtccggtgaagatgtcccactaaggtaagtttgacatggtgtaagggagttgaaaggggtaaacgcggataaagagcagattacttgaccctacattttaagagaagacgacgccttccgggcgcacgccgagcagaactccaccgacaccttatccttgtccacatggagacagactcctcccgccgagtcgtcctcttccagcaggtcctgcttctgctttcccaccggcagagcgtagtcgtggtcaccggcgggcgagtctctgaagagcgaggtggtcagccgcagtcccacgccgctcagccggctcagcaagcgagccagtccagtctcgttggctaagactgcccgtaggtagcgactctcctcctgcagtgcctgtacgcgtttgcccagctcccgattctcggcccgcagctcctggttctcggctgccagaccccggactcgactctccagccccatcacgtactccttcttcttcagtcgattaaggcgggcagcggccgccgccgccttccggggactctttgtcgccgcctggttgttgtcgttaccgctgccgccaccgccgcctcctcctggggactttctccgcctcttttcggcgctgccactgtcactgctgctgctgcagcctccgataccgtttaacagcctttgcagcaggtcagagaagcgctgcatttcagcagccgcggcctcatcgtcatcgtcccctctccacaggccgccgctatccgagcctccgccagacgaggagagaggccccggcgagctaagcccggggtccaggtgccagtccggttgcctggggtccaggagatccgccagttccagcccagacagaaagtccatatcctccgtctcttcccccgggaggctggcgatcgcctcctcctccatctcctcgggggagggcgcgcgcacggccacgccgccgcggctccccctcccggcttccaactctccttcgtcgccaaactgctgcttgcggccgggagatccggccgccgccgtctcctcctcccccgctgcagcccgggtcaggtcagagggcagcgaacaagttgcagccggctccgggctctcactgcgggttggggagttgctgcccgaggctgccagcagcttggtcaggctatgcctcatgagggccagcggcgggccgcggtaggccccggccgctaagagtgggcctcacgggccccaaggatcccaggccccagggcgggtagcccccggcactggccgaaacgaaatgcagggaaaggtccgagtcgcctcccgcctcacttggctagtcgaccccccgcgccaaggcgcggggagggacgggagaacgaagcggtgaggccctgcgatgactcgaccgcgccacccagacaacggcgtagccggaagtcagt

What is claimed is:

1. An isolated nucleic acid molecule comprising a polynucleotide having a nucleotide sequence at least 95% identical to a sequence selected from the group consisting of:
(a) a polynucleotide fragment of SEQ ID NO:X or a polynucleotide fragment of the cDNA sequence contained in Clone ID NO:Z, which is hybridizable to SEQ ID NO:X;
(b) a polynucleotide encoding a polypeptide fragment of SEQ ID NO:Y or a polypeptide fragment encoded by the cDNA sequence contained in cDNA Clone ID NO:Z, which is hybridizable to SEQ ID NO:X;
(c) a polynucleotide encoding a polypeptide fragment of a polypeptide encoded by SEQ ID NO:X or a polypeptide fragment encoded by the cDNA sequence contained in cDNA Clone ID NO:Z, which is hybridizable to SEQ ID NO:X;
(d) a polynucleotide encoding a polypeptide doumain of SEQ ID NO:Y or a polypeptide domain encoded by the cDNA sequence contained in cDNA Clone ID NO:Z, which is hybridizable to SEQ ID NO:X;
(e) a polynucleotide encoding a polypeptide epitope of SEQ ID NO:Y or a polypeptide epitope encoded by the cDNA sequence contained in EDNA Clone ID NO:Z, which is hybridizable to SEQ ID NO:X;
(f) a polynucleotide encoding a polypeptide of SEQ ID NO:Y or the cDNA sequence contained in cDNA Clone ID NO:Z, which is hybridizable to SEQ ID NO:X, having biological activity;
(g) a polynucleotide which is a variant of SEQ ID NO:X;
(h) a polynucleotide which is an allelic variant of SEQ ID NO:X;
(i) a polynucleotide which encodes a species homologue of the SEQ ID NO:Y;
(j) a polynucleotide capable of hybridizing under stringent conditions to any one of the polynucleotides specified in (a)-(i), wherein said polynucleotide does not hybridize under stringent conditions to a nucleic acid molecule having a nucleotide sequence of only A residues or of only T residues.

2. The isolated nucleic acid molecule of claim 1, wherein the polynucleotide fragment comprises a nucleotide sequence encoding a protein.

3. The isolated nucleic acid molecule of claim 1, wherein the polynucleotide fragment comprises a nucleotide sequence encoding the sequence identified as SEQ ID NO:Y or the polypeptide encoded by the cDNA sequence contained in cDNA Clone ID NO:Z, which is hybridizable to SEQ ID NO:X.

4. The isolated nucleic acid molecule of claim 1, wherein the polynucleotide fragment comprises the entire nucleotide sequence of SEQ ID NO:X or the cDNA sequence contained in cDNA Clone ID NO:Z, which is hybridizable to SEQ ID NO:X.

5. The isolated nucleic acid molecule of claim 2, wherein the nucleotide sequence comprise sequential nucleotide deletions from either the C-terminus or the N-terminus.

6. The isolated nucleic acid molecule of claim 3, wherein the nucleotide sequence comprises sequential nucleotide deletions from either the C-terminus or the N-terminus.

7. A recombinant vector comprising the isolated nucleic acid molecule of claim 1.

8. A method of making a recombinant host cell comprising the isolated nucleic acid molecule of claim 1.

9. A recombinant host cell produced by the method of claim 8.

10. The recombinant host cell of claim 9 comprising vectors equences.

11. An isolated polypeptide comprising an amino acid sequence at least 90% identical to a sequence selected from the group consisting of:
(a) a polypeptide fragment of SEQ ID NO:Y or the encoded sequence contained in cDNA Clone ID NO:Z;
(b) a polypeptide fragment of SEQ ID NO:Y or the encoded sequence contained in cDNA Clone ID NO:Z, having biological activity;
(c) a polypeptide domain of SEQ ID NO:Y or the encoded sequence contained in cDNA Clone ID NO:Z;
(d) a polypeptide epitope of SEQ ID NO:Y or the encoded sequence contained in cDNA Clone ID NO:Z;
(e) a full length protein of SEQ ID NO:Y or the encoded sequence contained in cDNA Clone ID NO:Z;
(f) a variant of SEQ ID NO:Y;
(g) an allelic variant of SEQ ID NO:Y; or
(h) a species homologue of the SEQ ID NO:Y.

12. The isolated polypeptide of claim 11, wherein the full length protein comprises sequential amino acid deletions from either the C-terminus or the N-terminus.

13. An isolated antibody that binds specifically to the isolated polypeptide of claim 11.

14. A recombinant host cell that expresses the isolated polypeptide of claim 11.

15. A method of making an isolated polypeptide comprising:
(a) culturing the recombinant host cell of claim 14 under conditions such that said polypeptide is expressed; and
(b) recovering said polypeptide.

16. The polypeptide produced by claim 15.

17. A method for preventing, treating, or ameliorating a medical condition, comprising administering to a mammalian subject a therapeutically effective amount of the polynucleotide of claim 1.

18. A method of diagnosing a pathological condition or a susceptibility to a pathological condition in a subject comprising:
(a) determining the presence or absence of a mutation in the polynucleotide of claim 1; and
(b) diagnosing a pathological condition or a susceptibility to a pathological condition based on the presence or absence of said mutation.

19. A method of diagnosing a pathological condition or a susceptibility to a pathological condition in a subject comprising:
(a) determining the presence or amount of expression of the polypeptide of claim 11 in a biological sample; and
(b) diagnosing a pathological condition or a susceptibility to a pathological condition based on the presence or amount of expression of the polypeptide.

20. A method for identifying a binding partner to the polypeptide of claim 1 comprising:
(a) contacting the polypeptide of claim 11 with a binding partner; and
(b) determining whether the binding partner effects an activity of the polypeptide.

21. The gene corresponding to the cDNA sequence of SEQ ID NO:Y.

22. A method of identifying an activity in a biological assay, wherein the method comprises:
(a) expressing SEQ ID NO:X in a cell;
(b) isolating the supernatant;
(c) detecting an activity in a biological assay; and
(d) identifying the protein in the supernatant having the activity.

23. The product produced by the method of claim 20.

24. A method for preventing, treating, or ameliorating a medical condition, comprising administering to a mammalian subject a therapeutically effective amount of the polypeptide of claim 11.
